(19) United States
(12) Patent Application Publication
(10) Pub. No.: US 2024/0052353 A1
(43) Pub. Date: Feb. 15, 2024

(54) Bispecific Aptamer Compositions for the Treatment of Retinal Disorders

(71) Applicant: Drive Therapeutics, L.L.C., Chapel Hill, NC (US)

(72) Inventors: Ryan QUICK, Raleigh, NC (US); Matthew LEVY, Chapel Hill, NC (US)

(73) Assignee: Drive Therapeutics, L.L.C., Chapel Hill, NC (US)

(21) Appl. No.: 17/995,613

(22) PCT Filed: Apr. 6, 2021
(86) PCT No.: PCT/US2021/025964

§ 371 Date: Oct. 6, 2022

Related U.S. Application Data
(60) Provisional application No. 63/005,629, filed on Apr. 6, 2020.

(51) Int. Cl. C12N 15/115; A61P 27/02

(52) U.S. Cl. CPC C12N 15/115; A61P 27/02; C12N 2310/16; C12N 2310/321

(57) ABSTRACT

Disclosed herein are bispecific aptamers having affinity for multiple ligands and in particular, VEGF, IL8 and Ang2, as well as pharmaceutical compositions comprising the same. Methods of using some bispecific aptamers for the treatment of retinal diseases and disorders are also disclosed, as well as methods of making such bispecific aptamers and compositions.

### CROSS-REFERENCE TO RELATED APPLICATIONS

[0001] This application is a 35 U.S.C. § 371 National Stage of International Patent Application No. PCT/US2021/025964, filed Apr. 6, 2021, claiming the benefit of provisional U.S. Application No. 63/005,629, filed Apr. 6, 2020. The entirety of these applications are hereby incorporated by reference for all purposes.

[0002] The instant application contains a Sequence Listing, which has been submitted via EFS-Web and is hereby incorporated by reference in its entirety. Said Sequence Listing, created on Jan. 12, 2023, is named 4790-107US2.XML and is 1,460,242 bytes in size.

### FIELD OF THE INVENTION

[0003] Disclosed herein are bispecific aptamers, pharmaceutical compositions comprising the same as well as methods of treating retinal disorders with bispecific aptamers and pharmaceutical compositions. Methods of manufacturing such bispecific aptamers and pharmaceutical compositions are also disclosed.

### BACKGROUND

[0004] Wet Age-Related Macular Degeneration (wAMD) affects more than 1.7 million Americans with about 200,000 new cases of wet AMD diagnosed each year (National Eye Institute). Anti-VEGF therapy (Lucentis®, Eylea®, Avastin®) is the standard of care and generally results in significant visual gains. Unfortunately, not all patients respond fully with as many as 25-75% of treated patients maintaining persistent retinal fluid (Wells et al. Ophthalmology 123, 1351-1359 (2016); Group, C. R., New England Journal of Medicine 364, 1897-1908 (2011); Heier et al. Ophthalmology 119, 2537-2548 (2012)). Persistent retinal fluid is associated with worse long-term visual outcomes compared to patients with dry/normal retinas (Sharma, S. et al. Ophthalmology 123, 865-875 (2016); Brown et al., Retina 33, 23-34 (2013)). For patients that respond well, treatment can be conducted at the prescribed dosing intervals (q4w, q8w or q 12w depending on the drug) or “as needed” to improve or maintain visual gains. For patients that do not respond well, monthly dosing is required. For example, nearly one third of the patients in the HARBOR trial required near monthly dosing, a consequence of ≥5 letter decrease in vision, intraretinal fluid, subretinal fluid, or subretinal pigment epithelial fluid (Ho et al. Ophthalmology 121, 2181-2192 (2014)). For patients that don't fully respond (e.g., maintain fluid), the standard practice is currently to switch from one anti-VEGF therapy (usually Avastin® to start) to one of the alternatives (Lucentis® or Eylea®). In some instances, treatment dosing is increased to levels beyond what is prescribed. However, improvements gained with switching are usually minimal and are mostly anecdotal (Shah, C. P. Review of Ophthalmology (2018); You et al. Retina (Philadelphia, Pa.) 38, 1156 (2018)).

[0005] Diabetic Macular Edema (DME), which is a type of diabetic retinopathy (DR), affects more than 750,000 Americans and is a leading cause of vision loss for people with diabetes (Varma, R. et al. JAMA Ophthalmology 132, 1334-1340 (2014). Anti-VEGF therapies are only effective for ˜30-40% of patients. For example, an analysis of data from the DRCR Network's Protocol I revealed only 40% of eyes showed improvement in best corrected visual acuity [BCVA] (≥10 letters) by week 12 following 3 doses of Lucentis®. No further vision improvement was observed for most patients beyond what was observed in the initial 12 weeks even after a year of monthly dosing (Gonzalez, V. H. et al. American Journal of Ophthalmology 172, 72-79 (2016). Vascular and tissue inflammation contribute to DME, which is supported by studies correlating high levels of cytokines in the vitreous and aqueous humors of DME patients (Roh et al., Ophthalmology 116, 80-86 (2009); Funk, M. et al. Retina 30, 1412-1419 (2010); Feng, S. et al. Journal of Diabetes Research 2018 (2018); Jonas et al. Retina 32, 2150-2157 (2012)). Steroids (Ozurdex® and Iluvien®) are approved as second-line treatment alone or in combination with anti-VEGF therapy. However, the broad mechanism of action of these drugs leads to partial downregulation of a host of different cytokines, chemokines and growth factors. This contributes to side effects such as increased ocular pressure and cataracts, which limits their use (Schwartz et al., Clinical Ophthalmology (Auckland, NZ) 10, 1723 (2016); Regillo, C. D. et al. Ophthalmic Surgery, Lasers and Imaging Retina 48, 291-301 (2017)).

[0006] The initial pivotal randomized controlled trials supported monthly dosing for Lucentis® and Avastin® and bimonthly dosing after 3-monthly doses for Eylea®. In order to mitigate the treatment burden of wAMD and DME, attention has been placed on researching the optimal dosing regimen for these medications. Anti-VEGF therapy has been administered at regularly spaced fixed intervals in ‘continuous’ regimens or at varying intervals in ‘discontinuous’ regimens in an attempt to reduce the burden, risks and costs of repeated intravitreal injections. These discontinuous regimens include a ‘pro re nata’ (PRN) approach based on findings of exudation, or a ‘treat and extend’ (T&E) approach that gradually increases assessment and treatment intervals after exudation is controlled. However, recent real-world data have shown that patients who receive a low number of annual injections achieve meaningfully worse visual acuity outcomes than those in pivotal trials.

[0007] Although anti-VEGF therapies have been effective and revolutionized the way retinal diseases are treated, a significant portion of patients do not respond to treatment or are undertreated due to the injection burden of current therapies and are left with inflammation, retinal fluid and edema. New approaches are needed to enhance efficacy, reduce treatment burden and improve patient care.

### SUMMARY OF THE INVENTION

[0008] Disclosed herein are bispecific aptamers (e.g., RNA aptamers) that specifically bind to two or more target molecules (e.g., VEGF, IL8, Ang2 and combinations thereof), as well as pharmaceutical compositions comprising such bispecific aptamers. Also disclosed are methods of using such bispecific aptamers and pharmaceutical compositions for the treatment of ocular disease and disorders (e.g., retinal diseases and disorders), as well as methods of making such bispecific aptamers and pharmaceutical compositions.

[0009] In one aspect, a bispecific RNA aptamer is disclosed comprising Formula I:

X₁-(aptamer1)-X₂-(linker)-Y₁-(aptamer2)-Y₂-invdT Formula I

wherein the bispecific aptamer comprises at least one nucleotide sequence shown in in Table A or at least one nucleotide sequences sharing at least about 70% identify with the nucleotide sequences shown in Table A.

[0010] In one embodiment, the aptamer and aptamer 2 each comprise a nucleotide sequence selected from SEQ ID Nos identified in Table 1 and sequences sharing at least about 70% identity with such SEQ ID Nos.

[0011] In a particular embodiment, the bispecific RNA aptamer has a hydrodynamic radius of about between about 9 and about 15 nm and more particularly, about 13.5 nm.

[0012] In a particular embodiment, aptamer 1 comprises a nucleotide sequence selected from SEQ ID. Nos.: 1-54. In a particular embodiment, aptamer 2 comprises a nucleotide sequence selected from SEQ ID. Nos.: 1-54.

[0013] In one embodiment, aptamer 1 and aptamer 2 are between about 30 and about 40 nucleotides in length.

[0014] In one embodiment, an inverted deoxythymidine (invdT) is incorporated at the 3′-end of the bispecific aptamer of Formula I, leading to the formation of a 3′-3′ linkage which inhibits both degradation by 3′ exonucleases and extension by DNA polymerases.

[0015] In another embodiment, the bispecific RNA aptamer specifically binds to VEGF or an isoform thereof (e.g., VEGF-A) and IL8 and inhibits the function thereof by between about 90% and about 100%, more particularly, about 90%, about 95%, about 98% or about 100%.

[0016] In a particular embodiment, the bispecific RNA aptamer binds to VEGF or an isoform thereof (e.g., VEGF-A) and IL8 with a binding affinity of between about 250 pM and about 20 pM, between about 500 nM and about 10 pM, or between about 750 nM and about 1 pM. In certain embodiments, the bispecific RNA aptamer has a binding affinity of about 250 nM, about 300 nM, about 350 nM, about 400 nM, about 450 nM, about 500 nM, about 550 nM, about 600 nM, about 650 nM, about 700 nM, about 750 nM or about 800 nM, about 850 nM, about 900 nM, about 950 nM or about 1 pM. In one embodiment, the bispecific RNA aptamer has a binding affinity less than about 20 pM, less than about 15 pM, less than about 10 pM, less than about 5 pM or about 1 pM or less.

[0017] In another embodiment the bispecific RNA aptamer specifically binds to VEGF or an isoform thereof (e.g., VEGF-A) and Ang2 and inhibits the function thereof by between about 90% and about 100%, more particularly, about 90%, about 95%, about 98% or about 100%.

[0018] In a particular embodiment, the bispecific RNA aptamer binds to VEGF or an isoform thereof (e.g., VEGF-a) and Ang2 with a binding affinity of about 250 pM and about 10 pM. In certain embodiments, the bispecific RNA aptamer has a binding affinity between about 500 nM and about 5 pM, or between about 750 nM and about 1 pM. In certain embodiments, the bispecific RNA aptamer has a binding affinity of about 250 nM, about 300 nM, about 350 nM, about 400 nM, about 450 nM, about 500 nM, about 550 nM, about 600 nM, about 650 nM, about 700 nM, about 750 nM or about 800 nM, about 850 nM, about 900 nM, about 950 nM or about 1 pM. In one embodiment, the bispecific RNA aptamer has a binding affinity less than about 10 pM, less than about 5 pM, or less than about 10 pM.

[0019] In a further embodiment, the bispecific RNA aptamer specifically binds to IL8 and Ang2 and inhibits the function thereof by between about 90% and about 100%, more particularly, about 90%, about 95%, about 98% or about 100%.

[0020] In a particular embodiment, the bispecific RNA aptamer binds to IL8 and Ang2 with a binding affinity of between about 20 pM and about 10 pM. In one embodiment, the bispecific aptamer has a binding affinity of about 20 pM, about 18 pM, about 15 pM, about 13 pM, about 10 pM, about 8 pM, about 5 pM, about 3 pM, or about Rogallo 1 pM.

[0021] In certain embodiments, X₁ comprises between 0-5 nucleotides, wherein the nucleotides are complementary to the nucleotides of X₂.

[0022] In certain embodiments, Y₁ comprises between 0-5 nucleotides that are complementary to the nucleotides of Y₂.

[0023] In one embodiment, the linker is a nucleotide linker comprising between 0 and 20 nucleotides.

[0024] In a particular embodiment, the linker is a nucleotide linker comprising one or more 2′ OMe uridine residues.

[0025] In certain embodiments, the nucleotide linker comprises UUUUU, where U is 2′ OMe. In certain embodiments, the nucleotide linker comprises GCCGUGUUUUCACGGC (SEQ ID NO:443); where U, G, C and A are 2′ OMe.

[0026] In a particular embodiment, the linker is a nucleotide linker comprising one or more 5 mU residues.

[0027] In certain embodiment, the linker is a non-nucleotide linker as shown in Table B.

[0028] In a particular embodiment, the linker is a heterobifunctional linker comprising a thiol reactive moiety (e.g., maleimide) and an amine reactive moiety.

[0029] In a particular embodiment, the linker is a non-nucleotide linker selected from the group consisting of 1,3-propanediol, 1,6 hexanediol, 1,12 dodecyldiol, triethylene glycol or hexaethylene glycol.

[0030] In one embodiment, aptamer A and aptamer B joined by hybridization.

[0031] In one embodiment, the bispecific RNA aptamer is modified with polyethylene glycol.

[0032] In certain embodiment, the polyethylene glycol is coupled to the bispecific aptamer.

[0033] In certain embodiments, the polyethylene glycol is coupled to a second linker, wherein the second linker is coupled to the bispecific aptamer.

[0034] In one embodiment, the bispecific RNA aptamer is modified with one or more additional therapeutic agents.

[0035] In certain embodiments, the bispecific RNA aptamer comprises one or more nucleotides that are chemically modified.

[0036] In a particular embodiment, the one or more chemically modified nucleotides are selected from the group consisting of 2′F Guanosine, 2′ OMe Guanosine, 2′OMe Adenosine, 2′OMe Cytosine, 2′OMe Uridine and combinations thereof.

[0037] In certain embodiments, the one or more chemical modification(s) result in one or more improved characteristics selected from the group consisting of in vivo stability, stability against degradation, binding affinity for its target, and/or improved delivery characteristics in comparison to the same bispecific RNA aptamer having unmodified nucleotides.

[0038] In one embodiment, the one or more chemical modification results in an improvement in in vivo stability and more particularly, the half-life of the non-pegylated bispecific RNA aptamer is greater than about 10 hours or more particularly, greater than about 20 hours.

[0039] In certain embodiments, the half-life of the non-pegylated bispecific RNA aptamer is between about 10 and about 100 hours, more particularly, between about 300 and about 700 hours.

[0040] In certain embodiments, the half-life of the non-pegylated bispecific aptamer is between about 400 and about 700 hours, more particularly, between about 500 and about 600 hours and even more particularly, about 500, about 525, about 550, about 575, or about 600 hours.

[0041] In a particular embodiment, the one or more modifications enhance the affinity and specificity of the binding moiety for the target molecule compared to the bispecific RNA aptamer having a binding moiety with unmodified nucleotides.

[0042] In a particular embodiment, the one or chemical modifications provide additional charge, polarizability, hydrophobicity, hydrogen bonding, electrostatic interaction, and functionality to the bispecific aptamer.

[0043] In certain embodiments, the bispecific RNA aptamer comprises a VEGF Aptamer selected from the group consisting of Aptamer 285, Aptamer 481 and Aptamer 628 and an IL8 Aptamer selected from the group consisting of Aptamer 269 and Aptamer 248 and combinations thereof.

[0044] In certain embodiments, the bispecific RNA aptamer comprises VEGF Aptamer 285 and IL8 Aptamer 269.

[0045] In certain embodiments, the bispecific RNA aptamer comprises VEGF Aptamer 285 and aptamer 2 comprises IL8 Aptamer 248.

[0046] In certain embodiments, the bispecific RNA aptamer comprises VEGF Aptamer 481 and aptamer 2 comprises IL8 Aptamer 269.

[0047] In certain embodiments, the bispecific RNA aptamer comprises VEGF Aptamer 481 and aptamer 2 comprises IL8 Aptamer 248.

[0048] In certain embodiments, the bispecific RNA aptamer comprises VEGF Aptamer 628 and aptamer 2 comprises IL8 Aptamer 269.

[0049] In certain embodiments, the bispecific RNA aptamer comprises VEGF Aptamer 628 and aptamer 2 comprises IL8 Aptamer 248.

[0050] In certain embodiments, the bispecific RNA aptamer comprises a VEGF Aptamer selected from the group consisting of Aptamer 285, Aptamer 481 and Aptamer 628 and an IL8 Aptamer selected from the group consisting of Aptamer 269 and Aptamer 248 and combinations thereof linked by hybridization.

[0051] In certain embodiments, the bispecific RNA aptamer comprises a VEGF Aptamer selected from the group consisting of Aptamer 285, Aptamer 481 and Aptamer 628 and an IL8 Aptamer selected from the group consisting of Aptamer 269 and Aptamer 248 and combinations thereof linked by a non-nucleotide linker.

[0052] In certain embodiments, the bispecific aptamer comprises Aptamer 285 and Aptamer 269 linked by a non-nucleotide linker.

[0053] In a particular embodiment, the bispecific aptamer comprises Aptamer 285 and Aptamer 269 linked by hybridization.

[0054] In one embodiment, the bispecific RNA aptamer is associated with one or more additional molecules, which association may be covalent or non-covalent. In certain embodiments, the association comprises a linker.

[0055] In a particular embodiment, the one or more additional molecules is selected from the group consisting of antibodies, peptides, proteins, carbohydrates, enzymes, polymers, drugs, small molecules, gold nanoparticles, radiolabels, fluorescent labels, dyes, haptens, other aptamers, or nucleic acids.

[0056] In a particular embodiment, the one or more additional molecules is polyethylene glycol.

[0057] In a third aspect, a pharmaceutical composition is disclosed comprising the bispecific RNA aptamer disclosed herein and a pharmaceutically acceptable carrier.

[0058] In a particular embodiment, the pharmaceutical composition is formulated for intravitreal administration.

[0059] In a fourth aspect, a syringe is disclosed, wherein the syringe is pre-filed with the pharmaceutical composition disclosed herein.

[0060] In a fifth aspect, a method of modulating (e.g., inhibiting) the function of at least one target molecule is disclosed, comprising contacting the target molecule with the bispecific aptamer disclosed herein.

[0061] In a particular embodiment, the target molecule is selected from VEGF, IL8, Ang2 or a combination thereof.

[0062] In a sixth aspect, a method of treating a retinal disease or disorder is disclosed comprising administering an effective amount of the bispecific aptamer disclosed herein to a subject in need thereof, thereby treating the retinal disease or disorder.

[0063] In a particular embodiment, the retinal disease or disorder is the wet form of age-related macular degeneration (wAMD).

[0064] In a particular embodiment, the retinal disease or disorder is diabetic retinopathy.

[0065] In a particular embodiment, the diabetic retinopathy is diabetic macular edema.

[0066] In a particular embodiment, the retinal disease is retinal vein occlusion.

[0067] In a particular embodiment, the retinal vein occlusion is branched retinal vein occlusion.

[0068] In a particular embodiment, the retinal vein occlusion is central retinal vein occlusion.

[0069] In a particular embodiment, the retinal disease is retinopathy of prematurity.

[0070] In a particular embodiment, the retinal disease is radiation retinopathy.

[0071] In one embodiment, the subject in need thereof has been diagnosed with the retinal disease or disorder.

[0072] In a particular embodiment, the subject in need thereof has been previously treated with other anti-VEGF agent(s), but where the subject has shown a suboptimal response to such treatment.

[0073] In another embodiment, the subject in need thereof is at risk for the retinal disease or disorder.

[0074] In one embodiment, the administering is intraocular administration.

[0075] In a particular embodiment, the administering is by intravitreal injection.

[0076] In a particular embodiment, the intravitreal injection is part of kit containing a syringe that is prefilled with the bispecific composition.

[0077] In a particular embodiment, treatment results in an increase in overall best corrected visual acuity (BCVA) as measured on the Early Treatment Diabetic Retinopathy Study (ETDRS) chart by at least 3 letters, at least 4 letters, at least 5 letters, at least 6 letters, at least 7 letters, at least 8 letters, at least 9 letters, at least 10 letters, at least 11 letters, at least 12 letters, at least 13 letters, at least 14 letters, at least 15 letters, at least 16 letters, at least 17 letters, at least 18 letters, at least 19 letters, at least 20 letters, or more than 20 letters as compared to an untreated control subject over a defined period of time, selected from at least one of 2 weeks, one month, 2 months, 3 months, 6 months, one year, 2 years, or 5 years.

[0078] In one embodiment, treatment results in a percentage of patients gaining ≥15 letters in BCVA from baseline of at least 10%, at least 15%, at least 20%, at least 25%, at least 30%, at least 35%, at least 40%, at least 45%, at least 50%, at least 55%, at least 60%, at least 65%, at least 70%, at least 75%, at least 80%, at least 85%, at least 90%, at least 95%, or more as compared to an untreated control subject over a defined period of time, selected from at least one of 2 weeks, one month, 2 months, 3 months, 6 months, one year, 2 years, or 5 years.

[0079] In one embodiment, treatment results in a percentage of patients gaining ≥10 letters in BCVA from baseline of at least 10%, at least 15%, at least 20%, at least 25%, at least 30%, at least 35%, at least 40%, at least 45%, at least 50%, at least 55%, at least 60%, at least 65%, at least 70%, at least 75%, at least 80%, at least 85%, at least 90%, at least 95%, or more as compared to an untreated control subject over a defined period of time, selected from at least one of 2 weeks, one month, 2 months, 3 months, 6 months, one year, 2 years, or 5 years.

[0080] In one embodiment, treatment results in a percentage of patients gaining ≥5 letters in BCVA from baseline of at least 10%, at least 15%, at least 20%, at least 25%, at least 30%, at least 35%, at least 40%, at least 45%, at least 50%, at least 55%, at least 60%, at least 65%, at least 70%, at least 75%, at least 80%, at least 85%, at least 90%, at least 95%, or more as compared to an untreated control subject over a defined period of time, selected from at least one of 2 weeks, one month, 2 months, 3 months, 6 months, one year, 2 years, or 5 years.

[0081] In a particular embodiment, treatment results in a reduction of retinal fluid as measured by fluorescein angiography (FA) and optical coherence tomography (OCT) of at least 10%, at least 15%, at least 20%, at least 25%, at least 30%, at least 35%, at least 40%, at least 45%, at least 50%, at least 55%, at least 60%, at least 65%, at least 70%, at least 75%, at least 80%, at least 85%, at least 90%, at least 95%, or more as compared to an untreated control subject over a defined period of time, selected from at least one of 2 weeks, one month, 2 months, 3 months, 6 months, one year, 2 years, or 5 years.

[0082] In a particular embodiment, treatment results in a reduction of retinal thickness as measured by fluorescein angiography (FA) and optical coherence tomography (OCT) of at least 10%, at least 15%, at least 20%, at least 25%, at least 30%, at least 35%, at least 40%, at least 45%, at least 50%, at least 55%, at least 60%, at least 65%, at least 70%, at least 75%, at least 80%, at least 85%, at least 90%, at least 95%, or more as compared to an untreated control subject over a defined period of time, selected from at least one of 2 weeks, one month, 2 months, 3 months, 6 months, one year, 2 years, or 5 years.

[0083] In a particular embodiment, treatment results in a reduction of the total area of choroidal neovascular (CNV) lesions as measured by fluorescein angiography (FA) and optical coherence tomography (OCT) of at least 10%, at least 15%, at least 20%, at least 25%, at least 30%, at least 35%, at least 40%, at least 45%, at least 50%, at least 55%, at least 60%, at least 65%, at least 70%, at least 75%, at least 80%, at least 85%, at least 90%, at least 95%, or more as compared to an untreated control subject over a defined period of time, selected from at least one of 2 weeks, one month, 2 months, 3 months, 6 months, one year, 2 years, or 5 years. In one embodiment, the method further comprises co-administering to the subject in need thereof at least one additional therapeutic modality, e.g., at least one additional therapeutic agent.

[0084] In a particular embodiment, the at least additional therapeutic agent is selected from Illuvien® and Ozurdex.®

[0085] In a seventh aspect, a method of treating a population of subjects in need thereof is provided, comprising administering an effective amount of the bispecific aptamer disclosed herein to such subjects.

[0086] In one embodiment, the method results in effective treatment for more than 30%, more than 35%, more than 40%, more than 45%, more than 50%, more than 55%, more than 60%, more than 65%, more than 70%, more than 75%, more than 80%, more than 85%, more than 90% or more than 95% of subjects treated. In a particular embodiment, effective treatment is measured by overall best corrected visual acuity (BCVA) as measured on the Early Treatment Diabetic Retinopathy Study (ETDRS).

[0087] In one embodiment, the method results in fewer than 30%, fewer than 25%, fewer than 20%, fewer than 15% or fewer than 10% of such subjects maintaining persistent retinal fluid.

[0088] In an eighth aspect, a method of making the bispecific RNA aptamer disclosed herein, comprising direct chemical synthesis, enzymatic synthesis, chemical synthesis followed by domain chemical conjugation, and/or domain hybridization.

[0089] In one embodiment, the bispecific aptamer is synthesized by direct chemical synthesis.

[0090] In one embodiment, the bispecific aptamer is synthesized by enzymatic synthesis.

[0091] In one embodiment, the bispecific aptamer is synthesized by chemical synthesis followed by domain chemical conjugation.

[0092] In one embodiment, the bispecific aptamer is synthesized by domain hybridization.

### BRIEF DESCRIPTION OF THE FIGURES

[0093] FIG. 1A Depicts structure of aptamer 285 as folded in mfold which is consistent with the experimentally derived structure.

[0094] FIG. 1B Depicts structure of aptamer 269 as folded in mfold which is consistent with the experimentally derived structure.

[0095] FIG. 1C Depicts structure of a bispecific aptamer comprised of aptamer 285 and aptamer 269 as folded in mfold. The structures of the aptamer domains are not consistent with the experimentally derived structure.

[0096] FIG. 1D Depicts structure of a bispecific aptamer comprised of a variant of aptamer 285 which has been extended by 2 base pairs (aptamer 285ex) and aptamer 269 as folded in mfold. The structures of the aptamer domains are consistent with the experimentally derived structure. The boxed region highlights the additional base pairs.

[0097] FIG. 1E Depicts the structure of a bispecific aptamer comprised of aptamer 285 and a variant of aptamer 269 which has been extended by 2 base pairs (aptamer 269ex) as folded in mfold. The structures of the aptamer domains are consistent with the experimentally derived structure. The boxed region highlights the additional base pairs.

[0098] FIG. 2: Depicts a plot of the experimentally derived relationship between molecular hydrodynamic radius and the intravitreal half-life. The target range for a bispecific aptamer is indicated.

[0099] FIG. 3: Depicts a flow diagram illustrating the steps involved in the synthesis, deprotection, PEGylation and purification of a bispecific aptamer by direct chemical synthesis.

[0100] FIG. 4: Depicts examples, approaches and parameters to link two aptamers by a nucleotide linker N(n). Two different aptamer domains can be linked by a linker comprised of nucleotides. The length of the linker can vary from 0 to 50 nucleotides in length. The linker can be unstructured or structured (e.g., designed to form a stem loop). When designed to form a stem loop the length of the stem can be varied from 2 to 10 nucleotides and then loop length varied from 3 to 10 nucleotides. A structured stem linker can be flanked by nucleotide linkers (X(n) and Y(n)) that are between 0 and 15 nucleotides in length.

[0101] FIG. 5A: Depicts examples, approaches and parameters to link two aptamers by a non-nucleotide linker. Aptamer domains can be linked with the 3′ end of the first aptamer attached to the 5′ end of the second aptamer.

[0102] FIG. 5B Depicts examples, approaches and parameters to link two aptamers by a non-nucleotide linker. Aptamer domains can be linked with the 3′ end of the first aptamer is attached to the 3′ end of the second aptamer.

[0103] FIG. 5C Depicts examples, approaches and parameters to link two aptamers by a non-nucleotide linker. Aptamer domains can be linked with the 5′ end of the first aptamer is attached to the 3′ end of the second aptamer.

[0104] FIG. 5D Depicts examples, approaches and parameters to link two aptamers by a non-nucleotide linker. Aptamer domains can be linked with the 5′ end of the first aptamer is attached to the 5′ end of the second aptamer.

[0105] FIG. 6: Depicts an exemplary bispecific aptamer composed of Aptamer 285 and Aptamer 269 linked by a nucleotide linkage composed of five mU residues produced by direct chemical synthesis. mA, mC, mU and mG are 2′OMe RNA, fG is 2′F RNA and sp3 is a 1,3 propanediol linker.

[0106] FIG. 7: Depicts an exemplary bispecific aptamer composed of aptamer 285 and aptamer 269 generated by post synthesis chemical conjugation. Depicted here, aptamer 285 and 269 are synthesized separately. Following synthesis aptamer 269 is PEGylated. Following PEGylation, the aptamers are chemically conjugated using a PEG linker. mA, mC, mU and mG are 2′OMe RNA, fG is 2′F RNA and sp3 is a 1,3 propanediol linker.

[0107] FIG. 8A: Depicts examples, approaches and parameters to link two aptamers by hybridization. Aptamer domains can be linked by hybridization in which the 3′ end the first aptamer is extended and designed to hybridize and form a duplex with a 3′ extension on the second aptamer. Or, aptamer domains can be linked by hybridization in which the 5′ end the first aptamer is extended and designed to hybridize and form a duplex with a 5′ extension on the second aptamer. The duplex length (DL) can vary between 3 and 35 nucleotides. The duplex may be separated from the aptamer by a nucleotidyl linker 0 to 25 nucleotides in length or a non-nucleotidyl linker.

[0108] FIG. 8B Depicts examples, approaches and parameters to link two aptamers by hybridization. Aptamer domains can be linked by hybridization in which the 3′ end the first aptamer is extended and designed to hybridize and form a duplex with a 5′ extension on the second aptamer. The duplex length (DL) can vary between 3 and 35 nucleotides. The duplex may be separated from the aptamer by a nucleotidyl linker 0 to 25 nucleotides in length or a non-nucleotidyl linker.

[0109] FIG. 8C Depicts examples, approaches and parameters to link two aptamers by hybridization. Aptamer domains can be linked by hybridization in which the 5′ end the first aptamer is extended and designed to hybridize and form a duplex with a 3′ extension on the second aptamer. The duplex length (DL) can vary between 3 and 35 nucleotides. The duplex may be separated from the aptamer by a nucleotidyl linker 0 to 25 nucleotides in length or a non-nucleotidyl linker.

[0110] FIG. 9: Depicts an exemplary bispecific aptamer composed of Aptamer 285 and Aptamer 269 linked by hybridization. Depicted here, aptamer 285 and 269 are synthesized separately bearing a short 8 nucleotide complementary extension. The extension is linked to each aptamer at the 3′ end by a hexaethylene glycol linker (S18). The 5′ end of aptamer 269 is PEGylated. mA, mC, mU and mG are 2′ OMe RNA, fG is 2′F RNA and sp3 is a 1,3 propanediol linker.

### DETAILED DESCRIPTION

### I. Definitions

[0111] The term “about” as used herein means a range of values including the specified value, which a person of ordinary skill in the art would consider reasonably similar to the specified value. In embodiments, the term “about” means within a standard deviation using measurements generally acceptable in the art. In embodiments, about means a range extending to +/−10% of the specified value. In embodiments, about means the specified value.

[0112] The terms “administering” or “administration” as used herein generally refer to introducing a therapeutic agent, composition, formulation, etc., to a desired site or location on or within the body of a subject, e.g., a site or location within the eye. Administration may be performed, e.g., by a health care provider. For purposes of convenience, the present specification refers generally to ophthalmologists. However, the methods described herein, including both the methods of the invention and other methods (e.g., methods for diagnosing and/or monitoring a retinal disorder) may be practiced by any qualified health care provider.

[0113] The term “affinity” as used herein refers to the strength of the sum total of noncovalent interactions between a single binding site of a molecule (e.g., an aptamer) and its binding partner (e.g., an antigen). Unless indicated otherwise, as used herein, “binding affinity” refers to intrinsic binding affinity which reflects a 1:1 interaction between members of a binding pair (e.g., antibody and antigen). The affinity of a molecule X for its partner Y can generally be represented by the dissociation constant (Kd). As used herein the term “high affinity” means less than 500 nM.

[0114] The term “antigen” as used herein refers to the binding site or epitope recognized by an antigen-binding aptamer. The term “aptamer” as used herein refers to a peptide or nucleic acid molecule, such as RNA or DNA that is capable of binding to a specific molecule with high affinity and specificity. Exemplary ligands that bind to an aptamer include, without limitation, small molecules, such as drugs, metabolites, intermediates, cofactors, transition state analogs, ions, metals, nucleic acids, and toxins, such as endotoxins. Aptamers may also bind natural and synthetic polymers, including proteins, peptides, nucleic acids, polysaccharides, glycoproteins, hormones, receptors and cell surfaces such as cell walls and cell membranes. The binding of a ligand to an aptamer, causes a conformational change in the effector domain and alters its ability to interact with its target molecule. An aptamer will most typically have been obtained by in vitro selection for binding of a target molecule. However, in vivo selection of an aptamer is also possible. Aptamers have specific binding regions which are capable of forming complexes with an intended target molecule in an environment, wherein other substances in the same environment are not complexed to the nucleic acid. The specificity of the binding is defined in terms of the comparative dissociation constants (Kd) of the aptamer for its ligand as compared to the dissociation constant of the aptamer for other materials in the environment or unrelated molecules in general. A ligand is one which binds to the aptamer with greater affinity than to unrelated material. Typically, the Kd for the aptamer with respect to its ligand will be at least about 10-fold less than the Kd for the aptamer with unrelated material or accompanying material in the environment. Even more preferably, the Kd will be at least about 50-fold less, more preferably at least 50 about 100-fold less, and most preferably at least about 200-fold less. An aptamer will typically be between about and about 300 nucleotides in length. More commonly, an aptamer will be between about 30 and about 100 nucleotides in length.

[0115] The term “aptamer domain” as used herein refers to refers to a nucleic acid element or domain within a nucleic acid sequence or polynucleotide sequence that, at a biophysically effective amount, will bind or have an affinity for one or a plurality of target molecules.

[0116] The term “bispecific aptamer” as used herein refers to an aptamer that binds two distinct antigens or two distinct epitopes within the same antigen. The bispecific aptamer may have cross-reactivity to other related antigens, for example to the same antigen from other species (homologs).

[0117] The term “carrier” as used herein refers to compound, composition, substance, or structure that, when in combination with a compound or composition, aids or facilitates preparation, storage, administration, delivery, effectiveness, selectivity, or any other feature of the compound or composition for its intended use or purpose. For example, a carrier can be selected to minimize any degradation of the active ingredient and to minimize any adverse side effects in the subject.

[0118] The term “co-administration” as used herein refers to administration of the bispecific aptamer described herein to a subject simultaneously or consecutively with one or more additional therapeutic agents. In a particular embodiment, the one or more additional therapeutic agents include steroids such as Illuvien® and Ozurdex®. In a particular embodiment, the one or more additional therapeutic agents include a Complement Factor 3 (C3) or Complement Factor 5 (C5) inhibitor for the treatment of geographic atrophy and the dry form of advanced macular degeneration. In one embodiment, the C3 inhibitor is APL-2 (Apellis Pharmaceuticals). In one embodiment, the C5 inhibitor is Zimura® (Iveric Bio).

[0119] The terms “complementary” or “complementarity” refer to the ability of a nucleic acid in a polynucleotide to form a base pair with another nucleic acid in a second polynucleotide. For example, the sequence A-G-T is complementary to the sequence T-C-A. Complementarity may be partial, in which only some of the nucleic acids match according to base pairing, or complete, where all the nucleic acids match according to base pairing.

[0120] The term “conjugation” as used herein refers to a chemical compound that is formed by joining two or more compounds with one or more chemical bonds or linkers. In an embodiment disclosed herein, a bispecific aptamer is conjugated to a lipid or high molecular weight compound (e.g., PEG), and/or another therapeutic agent.

[0121] The term “DNA” means deoxyribonucleic acid.

[0122] The terms “effective amount” and “therapeutically effective amount,” are used herein interchangeably to refer to a sufficient amount of an agent or a composition or combination of compositions being administered which will relieve to some extent one or more of the symptoms of the disease or condition being treated. The result can be reduction and/or alleviation of the signs, symptoms, or causes of a disease, or any other desired alteration of a biological system. For example, an “effective amount” for therapeutic uses is the amount of the composition as disclosed herein required to provide a clinically significant decrease in disease symptoms. An appropriate “effective” amount in any individual case may be determined using techniques, such as a dose escalation study. The dose could be administered in one or more administrations. However, the precise determination of what would be considered an effective dose may be based on factors individual to each patient, including, but not limited to, the patient's age, size, type or extent of disease, stage of the disease, route of administration, the type or extent of supplemental therapy used, ongoing disease process and type of treatment desired (e.g., aggressive vs. conventional treatment).

[0123] The term “epitope” as used herein refers to the part of an antigen (e.g., a substance that stimulates an immune system to generate an antibody against) that is specifically recognized by the antibody. In certain embodiments, the antigen is a protein or peptide and the epitope is a specific region of the protein or peptide that is recognized and bound by an antibody.

[0124] The term “hydrodynamic radius” or “Rh” as used herein refers to the radius of an equivalent hard-sphere diffusing at the same rate as the molecule under observation. In certain embodiments, the bispecific aptamers disclosed herein have a hydrodynamic radius that is about 50% greater than aptamers known in the art and more particularly, about 9, about 10, about 11, about 12, about 13, about 14 or about 15 Rh. In certain embodiments, a bispecific RNA aptamer is disclosed that has a hydrodynamic radius of between about 12 and about 14, and more particularly about 13, about 13.5 or about 14 Rh. In certain embodiments, this Rh is measured before pegylation of the bispecific aptamer, wherein pegylation would further increase the hydrodynamic radius, e.g., by about 1, about 2, about 3, about 4 or about 5 Rh or more over the non-pegylated bispecific aptamer.

[0125] The terms “identical” or percent “identity,” in the context of two or more nucleic acids or polypeptide sequences, refer to two or more sequences or subsequences that are the same or have a specified percentage of amino acid residues or nucleotides that are the same (i.e., about 60% identity, preferably 65%, 70%, 75%, 80%, 85%, 90%, 91%, 92%, 93%, 94%, 95%, 96%, 97%, 98%, 99%, or higher identity over a specified region, when compared and aligned for maximum correspondence over a comparison window or designated region) as measured using a BLAST or BLAST 2.0 sequence comparison algorithms with default parameters described below, or by manual alignment and visual inspection (see, e.g., NCBI web site http://www.ncbi.nlm.nih.gov/BLAST/ or the like). Such sequences are then said to be “substantially identical.” This definition also refers to, or may be applied to, the compliment of a test sequence. The definition also includes sequences that have deletions and/or additions, as well as those that have substitutions. As described below, the preferred algorithms can account for gaps and the like. Preferably, identity exists over a region that is at least about 25 amino acids or nucleotides in length, or more preferably over a region that is 50-100 amino acids or nucleotides in length.

[0126] The term “isolated” as used herein with reference to a nucleic acid or protein, indicates that the nucleic acid or protein or peptide is essentially free of other cellular components with which it is associated in the natural state. It can be, for example, in a homogeneous state and may be in either a dry or aqueous solution. Purity and homogeneity are typically determined using analytical chemistry techniques such as polyacrylamide gel electrophoresis or high-performance liquid chromatography (HPLC). A protein or peptide that is the predominant species present in a preparation is substantially purified.

[0127] The term “linker” as used herein refers to molecule positioned between two moieties. Typically, linkers are bifunctional, i.e., the linker includes a functional group at each end, wherein the functional groups are used to couple the linker to the two moieties.

[0128] The term “nucleic acid” as used herein refers to deoxyribonucleotides or ribonucleotides and polymers thereof in either single-, double- or multiple-stranded form, or complements thereof. The term “polynucleotide” refers to a linear sequence of nucleotides. The term “nucleotide” typically refers to a single unit of a polynucleotide, i.e., a monomer. Nucleotides can be ribonucleotides, deoxyribonucleotides, or modified versions thereof. Examples of polynucleotides contemplated herein include single and double stranded DNA, single and double stranded RNA (including siRNA), and hybrid molecules having mixtures of single and double stranded DNA and RNA. Nucleic acids can be linear or branched. For example, nucleic acids can be a linear chain of nucleotides or the nucleic acids can be branched, e.g., such that the nucleic acids comprise one or more arms or branches of nucleotides. Optionally, the branched nucleic acids are repetitively branched to form higher ordered structures such as dendrimers and the like.

[0129] The term “nucleotide linker” as used herein refers to oligonucleotide that connects an aptamer to another aptamer. In contrast a “non-nucleotide linker” refers to a linker that does not include nucleotides or nucleotide analogs. Without limitations, the nucleotide linker can be single-stranded or a double-stranded oligonucleotide, e.g., a linker comprising a first oligonucleotide strand and second oligonucleotide strand, wherein the first and the second strands are sufficiently complementary to each other. Furthermore, the nucleotide linker can comprise one or more of the nucleotide modifications described herein. A nucleotide linker can be of any length, e.g., between 4-30 nucleotides in length.

[0130] The term “pegylated compound” as used herein refers to a compound (e.g., an aptamer) with one or more polyethylene glycol moieties. In certain embodiments disclosed herein, the aptamer or bispecific aptamer is a pegylated compound.

[0131] The terms “peptide” and “protein” are used interchangeably herein to refer to polymers of amino acids of any length. A polypeptide can be any protein, peptide, protein fragment or component thereof. A polypeptide can be a protein naturally occurring in nature or a protein that is ordinarily not found in nature. A polypeptide can consist largely of the standard twenty protein-building amino acids or it can be modified to incorporate non-standard amino acids. A polypeptide can be modified, typically by the host cell, by e.g., adding any number of biochemical functional groups, including phosphorylation, acetylation, acylation, formylation, alkylation, methylation, lipid addition (e.g., palmitoylation, myristoylation, prenylation, etc.) and carbohydrate addition (e.g., N-linked and O-linked glycosylation, etc.). Polypeptides can undergo structural changes in the host cell such as the formation of disulfide bridges or proteolytic cleavage. The peptides described herein may be therapeutic peptides utilized for e.g., the treatment of a disease.

[0132] The term “pharmaceutical composition” as used herein refers to compositions that include an amount (for example, a unit dosage) of one or more of the disclosed bi-specific aptamers together with one or more non-toxic pharmaceutically acceptable additives, including carriers, diluents, and/or adjuvants, and optionally other biologically active ingredients.

[0133] The term “pharmaceutically acceptable” as used herein refers to those compounds, materials, compositions, and/or dosage forms which are, within the scope of sound medical judgment, suitable for use in contact with the tissues of human beings and animals without excessive toxicity, irritation, allergic response, or other problems or complications commensurate with a reasonable benefit/risk ratio.

[0134] The term “purified” as used herein refers to a peptide that gives rise to essentially one band in an electrophoretic gel. In some embodiments, the peptide is at least 50% pure, optionally at least 65% pure, optionally at least 75% pure, optionally at least 85% pure, optionally at least 95% pure, and optionally at least 99% pure.

[0135] The term “reduces” or “inhibits” are used interchangeably herein to refer to a negative alteration of at least 5%, at least 10%, at least 15%, at least 20%, at least 25%, at least 30%, at least 35%, at least 40%, at least 45%, at least 50%, at least 55%, at least 60%, at least 65%, at least 70%, at least 75%, or at least 100% or more.

[0136] The term “retinal disease” and “retinal disorder” are used interchangeably herein and refers to any disease or disorder in which the retina is affected due to multiple and variant etiologies.

[0137] The term “RNA” refers to ribonucleic acid.

[0138] The term “SELEX” as used herein refers to Systematic evolution of ligands by exponential enrichment and is a combination of (1) the selection of aptamers that interact with a target molecule in a desirable manner, for example binding with high affinity to a protein, with (2) the amplification of those selected nucleic acids. The SELEX process can be used to identify aptamers with high affinity to a specific target or biomarker.

[0139] The term “specifically binds” as used herein refers to the ability of an aptamer to bind to an antigen with an Kd of at least about 1 micromolar down to 1 picomolar and/or bind to an antigen with an affinity that is at least two-fold greater than its affinity for a nonspecific antigen. It shall be understood, however, that the bispecific aptamers disclosed herein are capable of specifically binding to two or more antigens which are related in sequence. For example, the bispecific aptamers disclosed herein can specifically bind to both a human antigen and a non-human ortholog of that antigen.

[0140] The terms “subject” and “patient” are used interchangeably herein to refer to a vertebrate, preferably a mammal, more preferably a human. Mammals include, but are not limited to, murines, simians, humans, farm animals, sport animals, and pets. Tissues, cells, and their progeny of a biological entity obtained in vivo or cultured in vitro are also encompassed.

[0141] The term “substantially homologous” or “substantially identical” in the context of two or more oligonucleotides, nucleic acids, or aptamers, generally refers to two or more sequences or subsequences that have at least 40%, 60%, 80%, 90%, 95%, 96%, 97%, 98% or 99% nucleotide identity, when compared and aligned for maximum correspondence, as measured using sequence comparison algorithms or by visual inspection.

[0142] The term “unit dosage form” as used herein refers to physically discrete units suited as unitary dosages for the subject to be treated (e.g., for a single eye); each unit containing a predetermined quantity of an active agent selected to produce the desired therapeutic effect, optionally together with a pharmaceutically acceptable carrier, which may be provided in a predetermined amount. The unit dosage form may be, for example, a volume of liquid (e.g., a pharmaceutically acceptable carrier) containing a predetermined quantity of a therapeutic agent, a predetermined amount of a therapeutic agent in solid form, an ocular implant containing a predetermined amount of a therapeutic agent, a plurality of nanoparticles or microparticles that collectively contain a predetermined amount of a therapeutic agent, etc. It will be appreciated that a unit dosage form may contain a variety of components in addition to the therapeutic agent. For example, pharmaceutically acceptable carriers, diluents, stabilizers, buffers, preservatives, etc., may be included. In certain embodiments, the aptamer or bispecific aptamer disclosed herein is provided in a unit dosage form.

[0143] The term “target molecule” or “target” are used interchangeably herein to refer any molecule of interest. The term includes any minor variation of a particular molecule, such as, in the case of a protein, for example, minor variations in amino acid sequence, disulfide bond formation, glycosylation, lipidation, acetylation, phosphorylation, or any other manipulation or modification, such as conjugation with a labeling component, which does not substantially alter the identity of the molecule. A “target molecule”, “target”, or “analyte” refers to a set of copies of one type or species of molecule or multi-molecular structure. “Target molecules”, “targets”, and “analytes” refer to more than one type or species of molecule or multi-molecular structure. Exemplary target molecules include proteins, polypeptides, nucleic acids, carbohydrates, lipids, polysaccharides, glycoproteins, hormones, receptors, antigens, antibodies, affibodies, antibody mimics, viruses, pathogens, toxic substances, substrates, metabolites, transition state analogs, cofactors, inhibitors, drugs, dyes, nutrients, growth factors, cells, tissues, and any fragment or portion of any of the foregoing. In some embodiments, a target molecule is a protein, in which case the target molecule may be referred to as a “target protein.”

[0144] The term “treatment or treating” as used herein means an approach for obtaining beneficial or desired results, including clinical results. Beneficial or desired clinical results can include, but are not limited to, alleviation or amelioration of one or more symptoms or conditions, diminishment of extent of disease, stabilized (i.e., not worsening) state of disease, preventing spread of disease, delay or slowing of disease progression, amelioration or palliation of the disease state, and remission (whether partial or total), whether detectable or undetectable.

[0145] The term “variant” as used herein with respect to a peptide, refers to a peptide in which an, insertion, deletion, addition and/or substitution has occurred in at least one amino acid residue relative to the reference peptide. The variant may be approximately 99%, 98%, 97%, 96%, 95%, 94%, 93%, 92%, 91%, 90%, 89%, 88%, 87%, 86%, 85%, 84%, 83%, 82%, 81% or 80% sequence of the aptamer or aptamer domain.

[0146] The terms “vascular endothelial growth factor”, and “VEGF” as used herein refer to naturally-occurring VEGF, including isoforms and variants thereof. As used herein, VEGF includes all mammalian species of VEGF, including but not limited to human, canine, feline, murine, primate, equine, and bovine VEGF.

### II. Bispecific Aptamer Compositions

[0147] In one aspect, a bispecific aptamer is disclosed comprising Formula A:

(aptamer1)-(linker)-(aptamer2) Formula A

[0148] In one embodiment, the bispecific aptamer is a DNA aptamer. In another embodiment, the bispecific aptamer is an RNA aptamer.

[0149] In a particular embodiment, the bispecific aptamer is an RNA aptamer wherein the sequence identities of (aptamer 1) and (aptamer 2) are indicated in Table 1.

[0150] In certain embodiments, the positions of (aptamer 1) and (aptamer 2) can be exchanged.

[0151] In certain embodiments, the linker is a nucleotide linker having between 0 and 20 nucleotides.

[0152] In certain embodiments, the linker is a non-nucleotide linker selected from the group consisting of 1,3-propanediol, 1,6 hexanediol, 1,12 dodecyldiol, triethylene glycol or hexaethylene glycol.

[0153] In certain embodiments, aptamer 1 or aptamer 2 is an aptamer that binds to vascular endothelial growth factor A (VEGF-A) selected from the group consisting of SEQ ID NOS: 1-46.

[0154] In certain embodiments, aptamer 1 or aptamer 2 is an aptamer that binds to interleukin 8 (IL8) selected from the group consisting of SEQ ID NOS: 47-48.

[0155] In certain embodiments, aptamer 1 or aptamer 2 is an aptamer that binds to angiopoietin 2 (ANG2) selected from the group consisting of SEQ ID NOS: 49-50.

[0156] In certain embodiments, aptamer 1 or aptamer 2 is an aptamer that binds to complement component 5 (C5) comprising SEQ ID NO: 51.

[0157] In certain embodiments, aptamer 1 or aptamer 2 is an aptamer that binds to platelet-derived growth factor (PDGF) comprising SEQ ID NO: 52.

[0158] In certain embodiments, aptamer 1 or aptamer 2 is an aptamer that binds to fibroblast growth factor (FGF) comprising SEQ ID NO: 53.

[0159] In certain embodiments, aptamer 1 or aptamer 2 is an aptamer that binds to Factor D comprising SEQ ID NO: 54.

[0160] In one aspect, a bispecific aptamer is disclosed comprising Formula II:

X₁-(aptamer1)-X₂-(linker)-Y₁-(aptamer2)-Y₂-invdT Formula I

[0161] In certain embodiments, the sequence identities of (aptamer 1) and (aptamer 2) are indicated in Table 1.

[0162] In certain embodiments, the positions of (aptamer 1) and (aptamer 2) can be exchanged. In certain embodiments, X₁ is 0-5 nucleotides in length that are designed to base pair with region X₂.

[0163] In certain embodiments, Y₁ is 0-5 nucleotides in length that are designed to base pair with region Y₂.

[0164] In certain embodiments, the linker is a nucleotide linker having between 0 and 20 nucleotides.

[0165] In certain embodiments, the linker is a non-nucleotide linker selected from the group consisting of 1,3-propanediol, 1,6 hexanediol, 1,12 dodecyldiol, triethylene glycol or hexaethylene glycol.

[0166] In one embodiment, an inverted deoxythymidine (invdT) is incorporated at the 3′-end of the bispecific aptamer of Formula I, leading to the formation of a 3′-3′ linkage which inhibits both degradation by 3′ exonucleases and extension by DNA polymerases.

[0167] In certain embodiments, aptamer 1 or aptamer 2 is an aptamer that binds to vascular endothelial growth factor A (VEGF-A) selected from the group consisting of SEQ ID NOS: 1-46.

[0168] In certain embodiments, aptamer 1 or aptamer 2 is an aptamer that binds to interleukin 8 (IL8) selected from the group consisting of SEQ ID NOS: 47-48.

[0169] In certain embodiments, aptamer 1 or aptamer 2 is an aptamer that binds to angiopoietin 2 (ANG2) selected from the group consisting of SEQ ID NOS: 49-50.

[0170] In certain embodiments, aptamer 1 or aptamer 2 is an aptamer that binds to complement component 5 (C5) comprising SEQ ID NO: 51.

[0171] In certain embodiments, aptamer 1 or aptamer 2 is an aptamer that binds to platelet-derived growth factor (PDGF) comprising SEQ ID NO: 52.

[0172] In certain embodiments, aptamer 1 or aptamer 2 is an aptamer that binds to fibroblast growth factor 2 (FGF2) comprising SEQ ID NO: 53.

[0173] In certain embodiments, aptamer 1 or aptamer 2 is an aptamer that binds to Factor D comprising SEQ ID NO: 54.

[0174] In another aspect, a bispecific aptamer is disclosed comprising Formula III:

5′-X₁-(aptamer1)-X₂-(linker)-(Hyb1) (Hyb2)-(linker)-Y₂-(aptamer2)-Y₁-5′ Formula II

wherein Hyb1 and Hyb2 are complementary.

[0175] In certain embodiments, the sequence identities of (aptamer 1) and (aptamer 2) are indicated in Table 1.

[0176] In certain embodiments, the positions of (aptamer 1) and (aptamer 2) can be exchanged.

[0177] In certain embodiments, X₁ is 0-5 nucleotides in length that are designed to base pair with region X₂.

[0178] In certain embodiments, Y₁ is 0-5 nucleotides in length that are designed to base pair with region Y₂.

[0179] In certain embodiments, the linker is a nucleotide linker having between 0 and 20 nucleotides.

[0180] In certain embodiments, the linker is a non-nucleotide linker selected from the group consisting of 1,3-propanediol, 1,6 hexanediol, 1,12 dodecyldiol, triethylene glycol or hexaethylene glycol.

[0181] In certain embodiments, aptamer 1 or aptamer 2 is an aptamer that binds to vascular endothelial growth factor A (VEGF-A) selected from the group consisting of SEQ ID NOS: 1-46.

[0182] In certain embodiments, aptamer 1 or aptamer 2 is an aptamer that binds to interleukin 8 (IL8) selected from the group consisting of SEQ ID NOS: 47-48.

[0183] In certain embodiments, aptamer 1 or aptamer 2 is an aptamer that binds to angiopoietin 2 (ANG2) selected from the group consisting of SEQ ID NOS: 49-50.

[0184] In certain embodiments, aptamer 1 or aptamer 2 is an aptamer that binds to complement component 5 (C5) comprising SEQ ID NO: 51.

[0185] In certain embodiments, aptamer 1 or aptamer 2 is an aptamer that binds to platelet-derived growth factor (PDGF) comprising SEQ ID NO: 52.

[0186] In certain embodiments, aptamer 1 or aptamer 2 is an aptamer that binds to fibroblast growth factor (FGF) comprising SEQ ID NO: 53.

[0187] In certain embodiments, aptamer 1 or aptamer 2 is an aptamer that binds to Factor D comprising SEQ ID NO: 54.

[0188] In certain embodiments, the bispecific RNA aptamer comprises a VEGF Aptamer selected from the group consisting of Aptamer 285, Aptamer 481 and Aptamer 628 and an IL8 Aptamer selected from the group consisting of Aptamer 269 and Aptamer 248 and combinations thereof.

[0189] In certain embodiments, the bispecific RNA aptamer comprises VEGF Aptamer 285 and IL8 Aptamer 269.

[0190] In certain embodiments, the bispecific RNA aptamer comprises VEGF Aptamer 285 and aptamer 2 comprises IL8 Aptamer 248.

[0191] In certain embodiments, the bispecific RNA aptamer comprises VEGF Aptamer 481 and aptamer 2 comprises IL8 Aptamer 269.

[0192] In certain embodiments, the bispecific RNA aptamer comprises VEGF Aptamer 481 and aptamer 2 comprises IL8 Aptamer 248.

[0193] In certain embodiments, the bispecific RNA aptamer comprises VEGF Aptamer 628 and aptamer 2 comprises IL8 Aptamer 269.

[0194] In certain embodiments, the bispecific RNA aptamer comprises VEGF Aptamer 628 and aptamer 2 comprises IL8 Aptamer 248.

[0195] In certain embodiments, the bispecific RNA aptamer comprises a VEGF Aptamer selected from the group consisting of Aptamer 285, Aptamer 481 and Aptamer 628 and an IL8 Aptamer selected from the group consisting of Aptamer 269 and Aptamer 248 and combinations thereof linked by hybridization.

[0196] In certain embodiments, the bispecific RNA aptamer comprises a VEGF Aptamer selected from the group consisting of Aptamer 285, Aptamer 481 and Aptamer 628 and an IL8 Aptamer selected from the group consisting of Aptamer 269 and Aptamer 248 and combinations thereof linked by a non-nucleotide linker.

[0197] In a particular embodiment of Formula III, the bispecific RNA aptamer further comprises between 3-25 nucleotides with complementary sequences that allow for the first and second aptamers to hybridize. In one embodiment, the complementary sequences are separated from the aptamer by a linker.

[0198] In one aspect, a bispecific aptamer having a hydrodynamic radius of about 9 or more, 10 or more Rh, about 11 or more Rh, about 12 or more Rh, about 13 or more Rh, about 14 or more Rh or about 15 or more Rh, and capable of binding to a target molecule selected from the group consisting of VEGF or isoforms thereof, IL8 or Ang2. Optionally, the bispecific aptamer is an RNA aptamer having at least one sequence disclosed in Table 1, herein.

TABLE 1

| SEQ | | | |
|---|---|---|---|
| ID | | | |
| NO: | Aptamer | Target | Sequence |
| 1 | 285 | VEGF | CXACZCCGCGCGGAGGGXUUUCAUAAUCCCGUUUXUCX |
| 2 | 26 | VEGF | AGGCCGCCUCCGCGCGGAGGGGUUUCAUUAUCCCGUUUGGCGGCUU |
| 3 | 439 | VEGF | CGACUCCGCGCGGAGGGUUGGAGGUUACCCGUUUGUCG |
| 4 | 441 | VEGF | CGACUCCGCGCGGAGUCCCUAAUUUGGGGCGUUUGUCG |
| 5 | 443 | VEGF | CGACUCCGCGCGGAGUCCCUUCAUUGGGGCGUUUGUCG |
| 6 | 445 | VEGF | CGACUCCGCGCGGAGGGUUAAUGGCUACCCGUUUGUCG |
| 7 | 447 | VEGF | CGACUCCGCGCGGAGUCCCUGUAAUGGGGCGUUUGUCG |
| 8 | 479 | VEGF | CGACUCCGCGCGGAGGGUUUGGCUACCCGUUUGUCG |
| 9 | 481 | VEGF | CGACUCCGCGCGGAGGCUUGAGGUAGCCGUUUGUCG |
| 10 | 483 | VEGF | CGACUCCGCGCGGAGUCCCACAUGGGGCGUUUGUCG |
| 11 | 485 | VEGF | CGACUCCGCGCGGAGGGAUGAGGUUCCCGUUUGUCG |
| 12 | 487 | VEGF | CGACUCCGCGCGGAGGCAUGAGGUUGCCGUUUGUCG |
| 13 | 489 | VEGF | CGACUCCGCGCGGAGUGCUGAGGUGCACGUUUGUCG |
| 14 | 600 | VEGF | CGACZCCGCGCGGAGGGUUGGAGGUUACCCGUUUGUCG |
| 15 | 601 | VEGF | CGACZCCGCGCGGAGUCCCUAAUUUGGGGCGUUUGUCG |
| 16 | 602 | VEGF | CGACZCCGCGCGGAGUCCCUUCAUUGGGGCGUUUGUCG |
| 17 | 603 | VEGF | CGACZCCGCGCGGAGGGUUAAUGGCUACCCGUUUGUCG |
| 18 | 604 | VEGF | CGACZCCGCGCGGAGUCCCUGUAAUGGGGCGUUUGUCG |
| 19 | 605 | VEGF | CGACZCCGCGCGGAGGGUUUGGCUACCCGUUUGUCG |
| 20 | 606 | VEGF | CGACZCCGCGCGGAGGCUUGAGGUAGCCGUUUGUCG |
| 21 | 607 | VEGF | CGACZCCGCGCGGAGUCCCACAUGGGGCGUUUGUCG |
| 22 | 608 | VEGF | CGACZCCGCGCGGAGGGAUGAGGUUCCCGUUUGUCG |
| 23 | 609 | VEGF | CGACZCCGCGCGGAGGCAUGAGGUUGCCGUUUGUCG |
| 24 | 610 | VEGF | CGACZCCGCGCGGAGUGCUGAGGUGCACGUUUGUCG |
| 25 | 611 | VEGF | CXACUCCGCGCGGAGGGUUGGAGGUUACCCGUUUXUCX |
| 26 | 612 | VEGF | CXACUCCGCGCGGAGUCCCUAAUUUGGGGCGUUUXUCX |
| 27 | 613 | VEGF | CXACUCCGCGCGGAGUCCCUUCAUUGGGGCGUUUXUCX |
| 28 | 614 | VEGF | CXACUCCGCGCGGAGGGUUAAUGGCUACCCGUUUXUCX |
| 29 | 615 | VEGF | CXACUCCGCGCGGAGUCCCUGUAAUGGGGCGUUUXUCX |
| 30 | 616 | VEGF | CXACUCCGCGCGGAGGGUUUGGCUACCCGUUUXUCX |
| 31 | 617 | VEGF | CXACUCCGCGCGGAGGCUUGAGGUAGCCGUUUXUCX |
| 32 | 618 | VEGF | CXACUCCGCGCGGAGUCCCACAUGGGGCGUUUXUCX |
| 33 | 619 | VEGF | CXACUCCGCGCGGAGGGAUGAGGUUCCCGUUUXUCX |
| 34 | 620 | VEGF | CXACUCCGCGCGGAGGCAUGAGGUUGCCGUUUXUCX |
| 35 | 621 | VEGF | CXACUCCGCGCGGAGUGCUGAGGUGCACGUUUXUCX |
| 36 | 622 | VEGF | CXACZCCGCGCGGAGGGUUGGAGGUUACCCGUUUXUCX |
| 37 | 623 | VEGF | CXACZCCGCGCGGAGUCCCUAAUUUGGGGCGUUUXUCX |
| 38 | 624 | VEGF | CXACZCCGCGCGGAGUCCCUUCAUUGGGGCGUUUXUCX |
| 39 | 625 | VEGF | CXACZCCGCGCGGAGGGUUAAUGGCUACCCGUUUXUCX |
| 40 | 626 | VEGF | CXACZCCGCGCGGAGUCCCUGUAAUGGGGCGUUUXUCX |
| 41 | 627 | VEGF | CXACZCCGCGCGGAGGGUUUGGCUACCCGUUUXUCX |
| 42 | 628 | VEGF | CXACZCCGCGCGGAGGCUUGAGGUAGCCGUUUXUCX |
| 43 | 629 | VEGF | CXACZCCGCGCGGAGUCCCACAUGGGGCGUUUXUCX |
| 44 | 630 | VEGF | CXACZCCGCGCGGAGGGAUGAGGUUCCCGUUUXUCX |
| 45 | 631 | VEGF | CXACZCCGCGCGGAGGCAUGAGGUUGCCGUUUXUCX |
| 46 | 632 | VEGF | CXACZCCGCGCGGAGUGCUGAGGUGCACGUUUXUCX |
| 47 | 248 | IL8 | XCXXUGGGAAAUGUGAGAUGGGUUXCCXC |
| 48 | 269 | IL8 | XXCXACXXUAXAUUAUGGGCAGUGUGACCXCXCC |
| 49 | 188 | Ang2 | XGGCAAAGGCAAAUCAAAACCGUUACAACCC |
| 50 | 204 | Ang2 | ACGGGGCAAUCCUGCCGUUUUACAGGUAAAXCCG |
| 51 | ARC1905 | C5 | CXCCGCXXUCUCAXXCGCUXAXUCUXAXUUUACCUXCX |
| 52 | ARC127 | PDGF | caggcUaCX(S18)cgtaXaXcaUCA(S18)tgatCCUX |
| 53 | 3(19) | FGF2 | XXXAUACUAXX(rG)CAUUAAUXUUACCA(rG)U(rG)UAXUCCC |
| 54 | 74 | FactorD | CCXCCUUGCCAGUAUUGGCUUAGGCUGGAAGUUUXXCXX |

Where G is 2′F RNA, X is 2′OMe G RNA, A, C, and U are 2′OMe RNA, C and U are 2′F RNA, a, g, c and t are DNA, Z is a 1,3-propanediolspacer and (S18) hexaethyleneglycol

[0199] The aptamers in Table 1, can be linked to one another using a variety of different linkers, including linkers composed of 0, 1, 3 5, 10, 15 or 20 nucleotides. The identity of the nucleotides can be varied and include A, G, C, U and T. The identity of the sugar on the nucleotide can also be varied and can be comprised of 2′H deoxyribose, 2′F deoxyribose or 2′OMe ribose or 2′-O-Methoxyethyl ribose. The linker sequence can also be comprised of bridged sugars such as LNA (locked nucleic acid) or cEt (constrained ethyl) nucleotide analogs. Additionally, the linker can be composed of non-nucleotide moieties including 1,3-propanediol, 1,6 hexanediol, 1,12 dodecyldiol, triethylene glycol or hexaethylene glycol (Table 2). These molecules can be added between the two aptamers 0-5 times to vary the distance between the molecules. Additionally, the order of the aptamer domains can be varied; aptamers can be placed 5′ or 3 primer the linker.

TABLE 2
Non-nucleotide linkers

1,3-propanediol
1,6 hexandiol
1,12 dodecyldiol
triethylene glycol
hexaethylene glycol

[0200] Non-limiting examples of bispecific aptamer compositions are shown in Tables 3-26 that comprise a VEGF-A binding domain and an IL-8 binding domain in various configurations.

[0201] Shown in Table 3, the anti-VEGF aptamer, aptamer 285 with an inverted T (SEQ ID NO: 55), and the anti-IL8 aptamer, aptamer 269 with an inverted T (SEQ ID NO: 56) were linked with no intervening linker (SEQ ID NO: 57), a non-nucleotide linker comprised of a 3-carbon non-nucleotidyl 1,3-propanediol spacer (Z) (SEQ ID NOS: 58 and 391), a non-nucleotide linker comprised of a hexaethylene glycol spacer (S18) (SEQ ID NOS: 59 and 392), a nucleotide linker comprised of five 2′OMe deoxyuridine residues (5U) (SEQ ID NO: 60), or a nucleotide linker comprised of ten 2′OMe deoxyuridine residues (10U)(SEQ ID NO: 61). The order of the aptamer domains is also varied (SEQ ID NOS: 62 and 393; SEQ ID NOS: 63 and 394; SEQ ID NOS: 64 and 395; SEQ ID NOS: 65 and 396; and SEQ ID NOS: 66 and 397).

TABLE 3

| SEQ ID | | | | |
|---|---|---|---|---|
| NO | 5′Apt | 3′Apt | Linker | Sequence |
| 55 | 285 | n/a | n/a | CXAC-Z-CCGCGCGGAGGGXUUUCAUAAUCCCGUUUXUCX- |
| | | | | invdT |
| 56 | 269 | n/a | n/a | XXCXACXXUAXAUUAUGGGCAGUGUGACCXCXCC-invdT |
| 57 | 285 | 269 | none | CXAC-Z-CCGCGCGGAGGGXUUUCAUAAUCCCGUUUXUCX- |
| | | | | XXCXACXXUAXAUUAUGGGCAGUGUGACCXCXCC-invdT |
| 58 | 285 | 269 | Z | CXAC-Z-CCGCGCGGAGGGXUUUCAUAAUCCCGUUUXUCX-Z- |
| 391 | | | | XXCXACXXUAXAUUAUGGGCAGUGUGACCXCXCC-invdT |
| 59 | 285 | 269 | S18 | CXAC-Z-CCGCGCGGAGGGXUUUCAUAAUCCCGUUUXUCX-S18- |
| 392 | | | | XXCXACXXUAXAUUAUGGGCAGUGUGACCXCXCC-invdT |
| 60 | 285 | 269 | 5U | CXAC-Z-CCGCGCGGAGGGXUUUCAUAAUCCCGUUUXUCX- |
| | | | | UUUUU-XXCXACXXUAXAUUAUGGGCAGUGUGACCXCXCC- |
| | | | | invdT |
| 61 | 285 | 269 | 10U | CXAC-Z-CCGCGCGGAGGGXUUUCAUAAUCCCGUUUXUCX- |
| | | | | UUUUUUUUUU- |
| | | | | XXCXACXXUAXAUUAUGGGCAGUGUGACCXCXCC-invdT |
| 62 | 269 | 285 | none | XXCXACXXUAXAUUAUGGGCAGUGUGACCXCXCC-CXAC-Z- |
| 393 | | | | CCGCGCGGAGGGXUUUCAUAAUCCCGUUUXUCX-invdT |
| 63 | 269 | 285 | Z | XXCXACXXUAXAUUAUGGGCAGUGUGACCXCXCC-Z-CXAC-Z- |
| 394 | | | | CCGCGCGGAGGGXUUUCAUAAUCCCGUUUXUCX-invdT |
| 64 | 269 | 285 | S18 | XXCXACXXUAXAUUAUGGGCAGUGUGACCXCXCC-S18-CXAC- |
| 395 | | | | Z-CCGCGCGGAGGGXUUUCAUAAUCCCGUUUXUCX-invdT |
| 65 | 269 | 285 | 5U | XXCXACXXUAXAUUAUGGGCAGUGUGACCXCXCC-UUUUU- |
| 396 | | | | CXAC-Z-CCGCGCGGAGGGXUUUCAUAAUCCCGUUUXUCX- |
| | | | | invdT |
| 66 | 269 | 285 | 10U | XXCXACXXUAXAUUAUGGGCAGUGUGACCXCXCC- |
| 397 | | | | UUUUUUUUUU-CXAC-Z- |
| | | | | CCGCGCGGAGGGXUUUCAUAAUCCCGUUUXUCX-invdT |

Where A, C and U are 2′OMe, X is 2′Ome G, G is 2′F G, Z is a 1,3-propanediolspacer, S18 is hexaethyleneglycol and -invdT is an inverted dT residue. Sequences in bold indicate base pairs added to stabilize a terminal stem and a dash (-) is used to flank the linker.

[0202] Using computational analysis (mfold) we observed that although in isolation each aptamer domain folds into a predicted structure consistent with experimentally derived aptamer structures (FIGS. 1A and 1B), linking the aptamers together in this manner resulted in the formation of non-native structures (FIG. 1C). Increasing distance between the domains using either a non-nucleotide linker (simulated by forcing the inter-aptamer region to be single stranded) or a nucleotide linker failed to allow the aptamers to adopt their native conformations. However, the addition of two additional base pairs to the terminal stem of aptamer 285 (SEQ ID NO: 67), or the terminal stem of aptamer 269 (SEQ ID NO: 78) within the bispecific constructs is sufficient to stabilize the native conformation of both aptamers in the context of the bispecific as predicted by mfold (FIGS. 1D and 1E).

[0203] Shown in Table 4, the extended version of 285, 285ex with an inverted T (SEQ ID NO: 67) can be combined with aptamer 269 with an inverted T (SEQ ID NO: 56) using no intervening linker (SEQ ID NO: 68), a non-nucleotide linker comprised of a 3-carbon non-nucleotidyl 1,3-propanediol spacer (Z) (SEQ ID NOS: 69 and 398), a non-nucleotide linker comprised of a hexaethylene glycol spacer (S18) (SEQ ID NOS: 70 and 399), a nucleotide linker comprised of five 2′OMe deoxyuridine residues (5U) (SEQ ID NO: 71), or a nucleotide linker comprised of ten 2′OMe deoxyuridine residues (10U) (SEQ ID NO: 72). The order of the aptamer domains is also varied (SEQ ID NOS: 73 and 400; SEQ ID NOS: 74 and 401; SEQ ID NOS:75 and 402; SEQ ID NOS: 76 and 403; and SEQ ID NOS: 77 and 404).

TABLE 4

| SEQ ID | | | | |
|---|---|---|---|---|
| NO | 5′Apt | 3′Apt | Linker | Sequence |
| 67 | 285ex | n/a | n/a | XCCXAC-Z- |
| | | | | CCGCGCGGAGGGXUUUCAUAAUCCCGUUUXUCXXC-invdT |
| 56 | 269 | n/a | n/a | XXCXACXXUAXAUUAUGGGCAGUGUGACCXCXCC-invdT |
| 68 | 285ex | 269 | none | XCCXAC-Z- |
| | | | | CCGCGCGGAGGGXUUUCAUAAUCCCGUUUXUCXXC- |
| | | | | XXCXACXXUAXAUUAUGGGCAGUGUGACCXCXCC-invdT |
| 69 | 285ex | 269 | Z | XCCXAC-Z- |
| 398 | | | | CCGCGCGGAGGGXUUUCAUAAUCCCGUUUXUCXXC-Z- |
| | | | | XXCXACXXUAXAUUAUGGGCAGUGUGACCXCXCC-invdT |
| 70 | 285ex | 269 | S18 | XCCXAC-Z- |
| 399 | | | | CCGCGCGGAGGGXUUUCAUAAUCCCGUUUXUCXXC-S18- |
| | | | | XXCXACXXUAXAUUAUGGGCAGUGUGACCXCXCC-invdT |
| 71 | 285ex | 269 | 5U | XCCXAC-Z- |
| | | | | CCGCGCGGAGGGXUUUCAUAAUCCCGUUUXUCXXC-UUUUU- |
| | | | | XXCXACXXUAXAUUAUGGGCAGUGUGACCXCXCC-invdT |
| 72 | 285ex | 269 | 10U | XCCXAC-Z- |
| | | | | CCGCGCGGAGGGXUUUCAUAAUCCCGUUUXUCXXC- |
| | | | | UUUUUUUUUU- |
| | | | | XXCXACXXUAXAUUAUGGGCAGUGUGACCXCXCC-invdT |
| 73 | 269 | 285ex | none | XXCXACXXUAXAUUAUGGGCAGUGUGACCXCXCC-XCCXAC-Z- |
| 400 | | | | CCGCGCGGAGGGXUUUCAUAAUCCCGUUUXUCXXC-invdT |
| 74 | 269 | 285ex | Z | XXCXACXXUAXAUUAUGGGCAGUGUGACCXCXCC-Z-XCCXAC- |
| 401 | | | | Z-CCGCGCGGAGGGXUUUCAUAAUCCCGUUUXUCXXC-invdT |
| 75 | 269 | 285ex | S18 | XXCXACXXUAXAUUAUGGGCAGUGUGACCXCXCC-S18- |
| 402 | | | | XCCXAC-Z- |
| | | | | CCGCGCGGAGGGXUUUCAUAAUCCCGUUUXUCXXC-invdT |
| 76 | 269 | 285ex | 5U | XXCXACXXUAXAUUAUGGGCAGUGUGACCXCXCC-UUUUU- |
| 403 | | | | XCCXAC-Z- |
| | | | | CCGCGCGGAGGGXUUUCAUAAUCCCGUUUXUCXXC-invdT |
| 77 | 269 | 285ex | 10U | XXCXACXXUAXAUUAUGGGCAGUGUGACCXCXCC- |
| 404 | | | | UUUUUUUUUU-XCCXAC-Z- |
| | | | | CCGCGCGGAGGGXUUUCAUAAUCCCGUUUXUCXXC-invdT |

Where A, C and U are 2′OMe, X is 2′Ome G, G is 2′F G, Z is a 1,3-propanediolspacer, S18 is hexaethyleneglycol and -invdT is an inverted dT residue. Sequences in bold indicate base pairs added to stabilize a terminal stem and a dash (-) is used to flank the linker.

[0204] Shown in Table 5, the extended version of 269, 269ex with an inverted T (SEQ ID NO: 78) can be combined with aptamer 285 with an inverted T (SEQ ID NO: 55) using no intervening linker (SEQ ID NO: 79), a non-nucleotide linker comprised of a 3-carbon non-nucleotidyl 1,3-propanediol spacer (Z) (SEQ ID NOS: 80 and 405), a non-nucleotide linker comprised of a hexaethylene glycol spacer (S18) (SEQ ID NOS: 81 and 406), a nucleotide linker comprised of five 2′OMe deoxyuridine residues (5U) (SEQ ID NO: 82), or a nucleotide linker comprised of ten 2′OMe deoxyuridine residues (10U) (SEQ ID NO: 83). The order of the aptamer domains is also varied (SEQ ID NOS: 84 and 407; SEQ ID NOS: 85 and 408; SEQ ID NOS: 86 and 409; SEQ ID NOS: 87 and 410; and SEQ ID NOS: 88 and 411).

TABLE 5

| SEQ ID | | | | |
|---|---|---|---|---|
| NO | 5′Apt | 3′Apt | Linker | Sequence |
| 55 | 285 | n/a | n/a | CXAC-Z-CCGCGCGGAGGGXUUUCAUAAUCCCGUUUXUCX- |
| | | | | invdT |
| 78 | 269ex | n/a | n/a | XCXXCXACXXUAXAUUAUGGGCAGUGUGACCXCXCCXC- |
| | | | | invdT |
| 79 | 285 | 269ex | none | CXAC-Z-CCGCGCGGAGGGXUUUCAUAAUCCCGUUUXUCX- |
| | | | | XCXXCXACXXUAXAUUAUGGGCAGUGUGACCXCXCCXC- |
| | | | | invdT |
| 80 | 285 | 269ex | Z | CXAC-Z-CCGCGCGGAGGGXUUUCAUAAUCCCGUUUXUCX-Z- |
| 405 | | | | XCXXCXACXXUAXAUUAUGGGCAGUGUGACCXCXCCXC- |
| | | | | invdT |
| 81 | 285 | 269ex | S18 | CXAC-Z-CCGCGCGGAGGGXUUUCAUAAUCCCGUUUXUCX- |
| 406 | | | | S18-XCXXCXACXXUAXAUUAUGGGCAGUGUGACCXCXCCXC- |
| | | | | invdT |
| 82 | 285 | 269ex | 5U | CXAC-Z-CCGCGCGGAGGGXUUUCAUAAUCCCGUUUXUCX- |
| | | | | UUUUU- |
| | | | | XCXXCXACXXUAXAUUAUGGGCAGUGUGACCXCXCCXC- |
| | | | | invdT |
| 83 | 285 | 269ex | 10U | CXAC-Z-CCGCGCGGAGGGXUUUCAUAAUCCCGUUUXUCX- |
| | | | | UUUUUUUUUU- |
| | | | | XCXXCXACXXUAXAUUAUGGGCAGUGUGACCXCXCCXC- |
| | | | | invdT |
| 84 | 269ex | 285 | none | XCXXCXACXXUAXAUUAUGGGCAGUGUGACCXCXCCXC- |
| 407 | | | | CXAC-Z-CCGCGCGGAGGGXUUUCAUAAUCCCGUUUXUCX- |
| | | | | invdT |
| 85 | 269ex | 285 | Z | XCXXCXACXXUAXAUUAUGGGCAGUGUGACCXCXCCXC-Z- |
| 408 | | | | CXAC-Z-CCGCGCGGAGGGXUUUCAUAAUCCCGUUUXUCX- |
| | | | | invdT |
| 86 | 269ex | 285 | S18 | XCXXCXACXXUAXAUUAUGGGCAGUGUGACCXCXCCXC-S18- |
| 409 | | | | CXAC-Z-CCGCGCGGAGGGXUUUCAUAAUCCCGUUUXUCX- |
| | | | | invdT |
| 87 | 269ex | 285 | 5U | XCXXCXACXXUAXAUUAUGGGCAGUGUGACCXCXCCXC- |
| 410 | | | | UUUUU-CXAC-Z- |
| | | | | CCGCGCGGAGGGXUUUCAUAAUCCCGUUUXUCX-invdT |
| 88 | 269ex | 285 | 10U | XCXXCXACXXUAXAUUAUGGGCAGUGUGACCXCXCCXC- |
| 411 | | | | UUUUUUUUUU-CXAC-Z- |
| | | | | CCGCGCGGAGGGXUUUCAUAAUCCCGUUUXUCX-invdT |

Where A, C and U are 2′OMe, X is 2′Ome G, G is 2′F G, Z is a 1,3-propanediolspacer, S18 is hexaethyleneglycol and -invdT is an inverted dT residue. Sequences in bold indicate base pairs added to stabilize a terminal stem and a dash (-) is used to flank the linker.

[0205] Shown in Table 6, the extended version of 285 with an inverted T (SEQ ID NO: 67) can be combined with the extended version of aptamer 269 with an inverted T (SEQ ID NO: 78) using no intervening linker (SEQ ID NO: 89), a non-nucleotide linker comprised of a 3-carbon non-nucleotidyl 1,3-propanediol spacer (Z) (SEQ ID NOS: 90 and 412), a non-nucleotide linker comprised of a hexaethylene glycol spacer (S18) (SEQ ID NOS: 91 and 413), a nucleotide linker comprised of five 2′OMe deoxyuridine residues (5U) (SEQ ID NO: 92), or a nucleotide linker comprised of ten 2′OMe deoxyuridine residues (10U) (SEQ ID NO: 93). The order of the aptamer is also varied (SEQ ID NOS: 94 and 414; SEQ ID NOS: 95 and 415; SEQ ID NOS: 96 and 416; SEQ ID NOS: 97 and 417; and SEQ ID NOS: 98-418).

TABLE 6

| SEQ ID | | | | |
|---|---|---|---|---|
| NO | 5′Apt | 3′Apt | Linker | Sequence |
| 67 | 285ex | n/a | n/a | XCCXAC-Z- |
| | | | | CCGCGCGGAGGGXUUUCAUAAUCCCGUUUXUCXXC-invdT |
| 78 | 269ex | n/a | n/a | XCXXCXACXXUAXAUUAUGGGCAGUGUGACCXCXCCXC- |
| | | | | invdT |
| 89 | 285ex | 269ex | none | XCCXAC-Z- |
| | | | | CCGCGCGGAGGGXUUUCAUAAUCCCGUUUXUCXXC- |
| | | | | XCXXCXACXXUAXAUUAUGGGCAGUGUGACCXCXCCXC- |
| | | | | invdT |
| 90 | 285ex | 269ex | Z | XCCXAC-Z- |
| 412 | | | | CCGCGCGGAGGGXUUUCAUAAUCCCGUUUXUCXXC-Z- |
| | | | | XCXXCXACXXUAXAUUAUGGGCAGUGUGACCXCXCCXC- |
| | | | | invdT |
| 91 | 285ex | 269ex | S18 | XCCXAC-Z- |
| 413 | | | | CCGCGCGGAGGGXUUUCAUAAUCCCGUUUXUCXXC-S18- |
| | | | | XCXXCXACXXUAXAUUAUGGGCAGUGUGACCXCXCCXC- |
| | | | | invdT |
| 92 | 285ex | 269ex | 5U | XCCXAC-Z- |
| | | | | CCGCGCGGAGGGXUUUCAUAAUCCCGUUUXUCXXC-UUUUU- |
| | | | | XCXXCXACXXUAXAUUAUGGGCAGUGUGACCXCXCCXC- |
| | | | | invdT |
| 93 | 285ex | 269ex | 10U | XCCXAC-Z- |
| | | | | CCGCGCGGAGGGXUUUCAUAAUCCCGUUUXUCXXC- |
| | | | | UUUUUUUUUU- |
| | | | | XCXXCXACXXUAXAUUAUGGGCAGUGUGACCXCXCCXC- |
| | | | | invdT |
| 94 | 269ex | 285ex | none | XCXXCXACXXUAXAUUAUGGGCAGUGUGACCXCXCCXC- |
| 414 | | | | XCCXAC-Z- |
| | | | | CCGCGCGGAGGGXUUUCAUAAUCCCGUUUXUCXXC-invdT |
| 95 | 269ex | 285ex | Z | XCXXCXACXXUAXAUUAUGGGCAGUGUGACCXCXCCXC-Z- |
| 415 | | | | XCCXAC-Z- |
| | | | | CCGCGCGGAGGGXUUUCAUAAUCCCGUUUXUCXXC-invdT |
| 96 | 269ex | 285ex | S18 | XCXXCXACXXUAXAUUAUGGGCAGUGUGACCXCXCCXC- |
| 416 | | | | S18-XCCXAC-Z- |
| | | | | CCGCGCGGAGGGXUUUCAUAAUCCCGUUUXUCXXC-invdT |
| 97 | 269ex | 285ex | 5U | XCXXCXACXXUAXAUUAUGGGCAGUGUGACCXCXCCXC- |
| 417 | | | | UUUUU-XCCXAC-Z- |
| | | | | CCGCGCGGAGGGXUUUCAUAAUCCCGUUUXUCXXC-invdT |
| 98 | 269ex | 285ex | 10U | XCXXCXACXXUAXAUUAUGGGCAGUGUGACCXCXCCXC- |
| 418 | | | | UUUUUUUUUU-XCCXAC-Z- |
| | | | | CCGCGCGGAGGGXUUUCAUAAUCCCGUUUXUCXXC-invdT |

Where A, C and U are 2′OMe, X is 2′Ome G, G is 2′F G, Z is a 1,3-propanediolspacer, S18 is hexaethyleneglycol and -invdT is an inverted dT residue. Sequences in bold indicate base pairs added to stabilize a terminal stem and a dash (-) is used to flank the linker.

[0206] Bispecific aptamer designs were extended to include other variants of aptamer 285 which were identified during a selection in which the Loop 4 of the aptamer was randomized. Shown in Table 7 are examples of bispecific aptamers sequences using anti-VEGF aptamer, aptamer 481 with an inverted T (SEQ ID NO: 99), and the anti-IL8 aptamer, aptamer 269 with an inverted T (SEQ ID NO: 56) linked with no intervening linker (SEQ ID NO: 100), a non-nucleotide linker comprised of a 3-carbon non-nucleotidyl 1,3-propanediol spacer (Z) (SEQ ID NOS: 101 and 419), a non-nucleotide linker comprised of a hexaethylene glycol spacer (S18) (SEQ ID NOS: 102 and 420), a nucleotide linker comprised of five 2′OMe deoxyuridine residues (5U) (SEQ ID NO: 103), or a nucleotide linker comprised of ten 2′OMe deoxyuridine residues (10U) (SEQ ID NO: 104). The order of the aptamer domains is also varied (SEQ ID NO: 105; SEQ ID NOS: 106, 421, and 422; and SEQ ID NOs: 107-109).

TABLE 7

| SEQ | | | | |
|---|---|---|---|---|
| ID | | | | |
| NO | 5′Apt | 3′Apt | Linker | Sequence |
| 99 | 481 | n/a | n/a | CXACUCCGCGCGGAGGCUUGAGGUAGC |
| | | | | CGUUUXUCX-invdT |
| 56 | 269 | n/a | n/a | XXCXACXXUAXAUUAUGGGCAGUGUGA |
| | | | | CCXCXCC-invdT |
| 100 | 481 | 269 | none | CXACUCCGCGCGGAGGCUUGAGGUAGC |
| | | | | CGUUUXUCX-XXCXACXXUAXAUUAUG |
| | | | | GGCAGUGUGACCXCXCC-invdT |
| 101 | 481 | 269 | Z | CXACUCCGCGCGGAGGCUUGAGGUAGC |
| 419 | | | | CGUUUXUCX-Z-XXCXACXXUAXAUUA |
| | | | | UGGGCAGUGUGACCXCXCC-invdT |
| 102 | 481 | 269 | S18 | CXACUCCGCGCGGAGGCUUGAGGUAGC |
| 420 | | | | CGUUUXUCX-S18-XXCXACXXUAXAU |
| | | | | UAUGGGCAGUGUGACCXCXCC-invdT |
| 103 | 481 | 269 | 5U | CXACUCCGCGCGGAGGCUUGAGGUAGC |
| | | | | CGUUUXUCX-UUUUU-XXCXACXXUAX |
| | | | | AUUAUGGGCAGUGUGACCXCXCC- |
| | | | | invdT |
| 104 | 285 | 269 | 10U | CXACUCCGCGCGGAGGCUUGAGGUAGC |
| | | | | CGUUUXUCX-UUUUUUUUUU-XXCXAC |
| | | | | XXUAXAUUAUGGGCAGUGUGACCXCXC |
| | | | | C-invdT |
| 105 | 269 | 481 | none | XXCXACXXUAXAUUAUGGGCAGUGUGA |
| | | | | CCXCXCC-CXACUCCGCGCGGAGGCUU |
| | | | | GAGGUAGCCGUUUXUCX-invdT |
| 106 | 269 | 481 | Z | XXCXACXXUAXAUUAUGGGCAGUGUGA |
| 421 | | | | CCXCXCC-Z-CXACUCCGCGCGGAGGC |
| 422 | | | | UUGAGGUAGCCGUUUXUCX-invdT |
| | | | | XXCXACXXUAXAUUAUGGGCAGUGUGA |
| | | | | CCXCXCC-S18-CXACUCCGCGCGGAG |
| | | | | GCUUGAGGUAGCCGUUUXUCX-invdT |
| 107 | 269 | 481 | S18 | XXCXACXXUAXAUUAUGGGCAGUGUGA |
| | | | | CCXCXCC-UUUUU-CXACUCCGCGCGG |
| | | | | AGGCUUGAGGUAGCCGUUUXUCX- |
| | | | | invdT |
| 108 | 269 | 481 | 5U | XXCXACXXUAXAUUAUGGGCAGUGUGA |
| | | | | CCXCXCC-UUUUUUUUUU-CXACUCCG |
| | | | | CGCGGAGGCUUGAGGUAGCCGUUUXUC |
| | | | | X-invdT |
| 109 | 269 | 481 | 10U | XXCXACXXUAXAUUAUGGGCAGUGUGA |
| | | | | CCXCXCC-CXACUCCGCGCGGAGGCUU |
| | | | | GAGGUAGCCGUUUXUCX-invdT |

Where A, C and U are 2′OMe, X is 2′Ome G, G is 2′F G, Z is a 1,3-propanediolspacer, S18 is hexaethyleneglycol and -invdT is an inverted dT residue.
Sequences in bold indicate base pairs added to stabilize a terminal stem and a dash (-) is used to flank the linker.

[0207] Shown in Table 8, an extended version of aptamer 481, 481ex with an inverted T (SEQ ID NO: 110) that contains two additional base pairs to stabilize the closing stem is combined with aptamer 269 with an inverted T (SEQ ID NO: 56) using no intervening linker (SEQ ID NO: 111), a non-nucleotide linker comprised of a 3-carbon non-nucleotidyl 1,3-propanediol spacer (Z) (SEQ ID NOS: 112 and 423), a non-nucleotide linker comprised of a hexaethylene glycol spacer (S18) (SEQ ID NO: 113 and 424), a nucleotide linker comprised of five 2′OMe deoxyuridine residues (5U) (SEQ ID NO: 114), or a nucleotide linker comprised of ten 2′OMe deoxyuridine residues (10U) (SEQ ID NO: 115). The order of the aptamer domains is also varied (SEQ ID NO: 116; SEQ ID NOS: 117 and 425; SEQ ID NOS: 118 and 426 and SEQ ID NOS:119-120).

TABLE 8

| SEQ | | | | |
|---|---|---|---|---|
| ID | | | | |
| NO | 5′Apt | 3′Apt | Linker | Sequence |
| 110 | 481ex | n/a | n/a | XCCXACUCCGCGCGGAGGCUUGAG |
| | | | | GUAGCCGUUUXUCXXC-invdT |
| 56 | 269 | n/a | n/a | XXCXACXXUAXAUUAUGGGCAGUG |
| | | | | UGACCXCXCC-invdT |
| 111 | 481ex | 269 | none | XCCXACUCCGCGCGGAGGCUUGAG |
| | | | | GUAGCCGUUUXUCXXC-XXCXACX |
| | | | | XUAXAUUAUGGGCAGUGUGACCXC |
| | | | | XCC-invdT |
| 112 | 481ex | 269 | Z | XCCXACUCCGCGCGGAGGCUUGAG |
| 423 | | | | GUAGCCGUUUXUCXXC-Z-XXCXA |
| | | | | CXXUAXAUUAUGGGCAGUGUGACC |
| | | | | XCXCC-invdT |
| 113 | 481ex | 269 | S18 | XCCXACUCCGCGCGGAGGCUUGAG |
| 424 | | | | GUAGCCGUUUXUCXXC-S18-XXC |
| | | | | XACXXUAXAUUAUGGGCAGUGUGA |
| | | | | CCXCXCC-invdT |
| 114 | 481ex | 269 | 5U | XCCXACUCCGCGCGGAGGCUUGAG |
| | | | | GUAGCCGUUUXUCXXC-UUUUU-X |
| | | | | XCXACXXUAXAUUAUGGGCAGUGU |
| | | | | GACCXCXCC-invdT |
| 115 | 481ex | 269 | 10U | XCCXACUCCGCGCGGAGGCUUGAG |
| | | | | GUAGCCGUUUXUCXXC-UUUUUUU |
| | | | | UUU-XXCXACXXUAXAUUAUGGGC |
| | | | | AGUGUGACCXCXCC-invdT |
| 116 | 269 | 481ex | none | XXCXACXXUAXAUUAUGGGCAGUG |
| | | | | UGACCXCXCC-XCCXACUCCGCGC |
| | | | | GGAGGCUUGAGGUAGCCGUUUXUC |
| | | | | XXC-invdT |
| 117 | 269 | 481ex | Z | XXCXACXXUAXAUUAUGGGCAGUG |
| 425 | | | | UGACCXCXCC-Z-XCCXACUCCGC |
| | | | | GCGGAGGCUUGAGGUAGCCGUUUX |
| | | | | UCXXC-invdT |
| 118 | 269 | 481ex | S18 | XXCXACXXUAXAUUAUGGGCAGUG |
| 426 | | | | UGACCXCXCC-S18-XCCXACUCC |
| | | | | GCGCGGAGGCUUGAGGUAGCCGUU |
| | | | | UXUCXXC-invdT |
| 119 | 269 | 481ex | 5U | XXCXACXXUAXAUUAUGGGCAGUG |
| | | | | UGACCXCXCC-UUUUU-XCCXACU |
| | | | | CCGCGCGGAGGCUUGAGGUAGCCG |
| | | | | UUUXUCXXC-invdT |
| 120 | 269 | 481ex | 10U | XXCXACXXUAXAUUAUGGGCAGUG |
| | | | | UGACCXCXCC-UUUUUUUUUU-XC |
| | | | | CXACUCCGCGCGGAGGCUUGAGGU |
| | | | | AGCCGUUUXUCXXC-invdT |

Where A, C and U are 2′OMe, X is 2′Ome G, G is 2′F G, Z is a 1,3-propanediolspacer, S18 is hexaethyleneglycol and -invdT is an inverted dT residue.
Sequences in bold indicate base pairs added to stabilize a terminal stem and a dash (-) is used to flank the linker.

[0208] Shown in Table 9, the extended version of 269, 269ex with an inverted T (SEQ ID NO: 78) is combined with aptamer 481 with an inverted T (SEQ ID NO: 99) using no intervening linker (SEQ ID NO: 121), a non-nucleotide linker comprised of a 3-carbon non-nucleotidyl 1,3-propanediol spacer (Z) (SEQ ID NOS: 122 and 427), a non-nucleotide linker comprised of a hexaethylene glycol spacer (S18) (SEQ ID NOS: 123 and 428), a nucleotide linker comprised of five 2′OMe deoxyuridine residues (5U) (SEQ ID NO: 124), or a nucleotide linker comprised of ten 2′OMe deoxyuridine residues (10U) (SEQ ID NO: 125). The order of the aptamer domains is also varied.

TABLE 9

| SEQ | | | | |
|---|---|---|---|---|
| ID | | | | |
| NO | 5′Apt | 3′Apt | Linker | Sequence |
| 99 | 481 | n/a | n/a | CXACUCCGCGCGGAGGCUUGAGGUAG |
| | | | | CCGUUUXUCX-invdT |
| 78 | 269ex | n/a | n/a | XCXXCXACXXUAXAUUAUGGGCAGUG |
| | | | | UGACCXCXCCXC-invdT |
| 121 | 481 | 269ex | none | CXACUCCGCGCGGAGGCUUGAGGUAG |
| | | | | CCGUUUXUCX-XCXXCXACXXUAXAU |
| | | | | UAUGGGCAGUGUGACCXCXCCXC- |
| | | | | invdT |
| 122 | 481 | 269ex | Z | CXACUCCGCGCGGAGGCUUGAGGUAG |
| 427 | | | | CCGUUUXUCX-Z-XCXXCXACXXUAX |
| | | | | AUUAUGGGCAGUGUGACCXCXCCXC- |
| | | | | invdT |
| 123 | 481 | 269ex | S18 | CXACUCCGCGCGGAGGCUUGAGGUAG |
| 428 | | | | CCGUUUXUCX-S18-XCXXCXACXXU |
| | | | | AXAUUAUGGGCAGUGUGACCXCXCCX |
| | | | | C-invdT |
| 124 | 481 | 269ex | 5U | CXACUCCGCGCGGAGGCUUGAGGUAG |
| | | | | CCGUUUXUCX-UUUUU-XCXXCXACX |
| | | | | XUAXAUUAUGGGCAGUGUGACCXCXC |
| | | | | CXC-invdT |
| 125 | 285 | 269ex | 10U | CXACUCCGCGCGGAGGCUUGAGGUAG |
| | | | | CCGUUUXUCX-UUUUUUUUUU-XCXX |
| | | | | CXACXXUAXAUUAUGGGCAGUGUGAC |
| | | | | CXCXCCXC-invdT |
| 126 | 269ex | 481 | none | XXCXACXXUAXAUUAUGGGCAGUGUG |
| | | | | ACCXCXCC-XCCXACUCCGCGCGGAG |
| | | | | GCUUGAGGUAGCCGUUUXUCXXC- |
| | | | | invdT |
| 127 | 269ex | 481 | Z | XXCXACXXUAXAUUAUGGGCAGUGUG |
| 429 | | | | ACCXCXCC-Z-XCCXACUCCGCGCGG |
| | | | | AGGCUUGAGGUAGCCGUUUXUCXXC- |
| | | | | invdT |
| 128 | 269ex | 481 | S18 | XXCXACXXUAXAUUAUGGGCAGUGUG |
| 430 | | | | ACCXCXCC-S18-XCCXACUCCGCGC |
| | | | | GGAGGCUUGAGGUAGCCGUUUXUCXX |
| | | | | C-invdT |
| 129 | 269ex | 481 | 5U | XXCXACXXUAXAUUAUGGGCAGUGUG |
| | | | | ACCXCXCC-UUUUU-XCCXACUCCGC |
| | | | | GCGGAGGCUUGAGGUAGCCGUUUXUC |
| | | | | XXC-invdT |
| 130 | 269ex | 481 | 10U | XXCXACXXUAXAUUAUGGGCAGUGUG |
| | | | | ACCXCXCC-UUUUUUUUUU-XCCXAC |
| | | | | UCCGCGCGGAGGCUUGAGGUAGCCGU |
| | | | | UUXUCXXC-invdT |

Where A, C and U are 2′OMe, X is 2′Ome G, G is 2′F G, Z is a 1,3-propanediolspacer, S18 is hexaethyleneglycol and -invdT is an inverted dT residue.
Sequences in bold indicate base pairs added to stabilize a terminal stem and a dash (-) is used to flank the linker.

[0209] Shown in Table 10, the extended version of 481 (SEQ ID NO: 99) is combined with the extended version of aptamer 269 (SEQ ID NO: 78) using no intervening linker (SEQ ID NO: 131), a non-nucleotide linker comprised of a 3-carbon non-nucleotidyl 1,3-propanediol spacer (Z) (SEQ ID NOS: 132 and 431), a non-nucleotide linker comprised of a hexaethylene glycol spacer (S18) (SEQ ID NOS: 133 and 432), a nucleotide linker comprised of five 2′OMe deoxyuridine residues (5U) (SEQ ID NO: 134), or a nucleotide linker comprised of ten 2′OMe deoxyuridine residues (10U) (SEQ ID NO: 135). The order of the aptamer domains is also varied (SEQ ID NOS: 136-140).

TABLE 10

| SEQ | | | | |
|---|---|---|---|---|
| ID | | | | |
| NO | 5′ Apt | 3′Apt | Linker | Sequence |
| 99 | 481ex | n/a | n/a | XCCXACUCCGCGCGGAGGC |
| | | | | UUGAGGUAGCCGUUUXUCX |
| | | | | XC-invdT |
| 78 | 269ex | n/a | n/a | XCXXCXACXXUAXAUUAUG |
| | | | | GGCAGUGUGACCXCXCCX |
| | | | | C-invdT |
| 131 | 481ex | 269ex | none | XCCXACUCCGCGCGGAGGC |
| | | | | UUGAGGUAGCCGUUUXUCX |
| | | | | XC-XCXXCXACXXUAXAUU |
| | | | | AUGGGCAGUGUGACCXCXC |
| | | | | CXC-invdT |
| 132 | 481ex | 269ex | Z | XCCXACUCCGCGCGGAGGC |
| 431 | | | | UUGAGGUAGCCGUUUXUCX |
| | | | | XC-Z-XCXXCXACXXUAXA |
| | | | | UUAUGGGCAGUGUGACCXC |
| | | | | XCCXC-invdT |
| 133 | 481ex | 269ex | S18 | XCCXACUCCGCGCGGAGGC |
| 432 | | | | UUGAGGUAGCCGUUUXUCX |
| | | | | XC-S18-XCXXCXACXXUA |
| | | | | XAUUAUGGGCAGUGUGACC |
| | | | | XCXCCXC-invdT |
| 134 | 481ex | 269ex | 5U | XCCXACUCCGCGCGGAGGC |
| | | | | UUGAGGUAGCCGUUUXUCX |
| | | | | XC-UUUUU-XCXXCXACXX |
| | | | | UAXAUUAUGGGCAGUGUGA |
| | | | | CCXCXCCXC-invdT |
| 135 | 481ex | 269ex | 10U | XCCXACUCCGCGCGGAGGC |
| | | | | UUGAGGUAGCCGUUUXUCX |
| | | | | XC-UUUUUUUUUU-XCXXC |
| | | | | XACXXUAXAUUAUGGGCAG |
| | | | | UGUGACCXCXCCXC-invdT |
| 136 | 269ex | 481ex | none | XCXXCXACXXUAXAUUAUG |
| | | | | GGCAGUGUGACCXCXCCXC- |
| | | | | XCCXACUCCGCGCGGAGGC |
| | | | | UUGAGGUAGCCGUUUXUCX |
| | | | | XC-invdT |
| 137 | 269ex | 481ex | Z | XCXXCXACXXUAXAUUAUG |
| | | | | GGCAGUGUGACCXCXCCXC- |
| | | | | XCCXACUCCGCGCGGAGGC |
| | | | | UUGAGGUAGCCGUUUXUCX |
| | | | | XC-invdT |
| 138 | 269ex | 481ex | S18 | XCXXCXACXXUAXAUUAUG |
| | | | | GGCAGUGUGACCXCXCCXC- |
| | | | | XCCXACUCCGCGCGGAGGC |
| | | | | UUGAGGUAGCCGUUUXUCX |
| | | | | XC-invdT |
| 139 | 269ex | 481ex | 5U | XCXXCXACXXUAXAUUAUG |
| | | | | GGCAGUGUGACCXCXCCXC- |
| | | | | UUUUU-XCCXACUCCGCGC |
| | | | | GGAGGCUUGAGGUAGCCGU |
| | | | | UUXUCXXC-invdT |
| 140 | 269ex | 481ex | 10U | XCXXCXACXXUAXAUUAUG |
| | | | | GGCAGUGUGACCXCXCCXC- |
| | | | | UUUUUUUUUU-XCCXACUC |
| | | | | CGCGCGGAGGCUUGAGGUA |
| | | | | GCCGUUUXUCXXC-invdT |

Where A, C and U are 2′OMe, X is 2′Ome G, G is 2′F G, Z is a 1,3-propanediolspacer, S18 is hexaethyleneglycol and -invdT is an inverted dT residue.
Sequences in bold indicate base pairs added to stabilize a terminal stem and a dash (-) is used to flank the linker.

[0210] Aptamer 628 (SEQ ID NO: 141) is a variant of aptamer 481 in which the U at position 5 relative to the start of aptamer 481 has been replaced with a Z non-nucleotidyl linker. Shown in Table 11 are examples of bispecific aptamers sequences generated using anti-VEGF aptamer, aptamer 628 with an inverted T (SEQ ID: 141), and the anti-IL8 aptamer, aptamer 269 with an inverted T (SEQ ID NO: 56) linked with no intervening linker (SEQ ID NO: 142), a non-nucleotide linker comprised of a 3-carbon non-nucleotidyl 1,3-propanediol spacer (Z) (SEQ ID NOS: 143 and 433), a non-nucleotide linker comprised of a hexaethylene glycol spacer (S18) (SEQ ID NOS: 144 and 434), a nucleotide linker comprised of five 2′OMe deoxyuridine residues (5U) (SEQ ID NO: 145), or a nucleotide linker comprised of ten 2′OMe deoxyuridine residues (10U) (SEQ ID NO: 146). The order of the aptamer domains is also varied (SEQ ID NOS: 147 and 435; SEQ ID NOS: 148 and 436; SEQ ID NOS: 149 and 437; SEQ ID NOS: 150 and 438; and SEQ ID NO: 151).

TABLE 11

| SEQ | | | | |
|---|---|---|---|---|
| ID | | | | |
| NO | 5′Apt | 3′Apt | Linker | Sequence |
| 141 | 628 | n/a | n/a | CXAC-Z-CCGCGCGGAGGCUUG |
| | | | | AGGUAGCCGUUUXUCX-invdT |
| 56 | 269 | n/a | n/a | XXCXACXXUAXAUUAUGGGCAG |
| | | | | UGUGACCXCXCC-invdT |
| 142 | 628 | 269 | none | CXAC-Z-CCGCGCGGAGGCUUG |
| | | | | AGGUAGCCGUUUXUCX-XXCXA |
| | | | | CXXUAXAUUAUGGGCAGUGUGA |
| | | | | CCXCXCC-invdT |
| 143 | 628 | 269 | Z | CXAC-Z-CCGCGCGGAGGCUUG |
| 433 | | | | AGGUAGCCGUUUXUCX-Z-XXC |
| | | | | XACXXUAXAUUAUGGGCAGUGU |
| | | | | GACCXCXCC-invdT |
| 144 | 628 | 269 | S18 | CXAC-Z-CCGCGCGGAGGCUUG |
| 434 | | | | AGGUAGCCGUUUXUCX-S18-X |
| | | | | XCXACXXUAXAUUAUGGGCAGU |
| | | | | GUGACCXCXCC-invdT |
| 145 | 628 | 269 | 5U | CXAC-Z-CCGCGCGGAGGCUUG |
| | | | | AGGUAGCCGUUUXUCX-UUUUU- |
| | | | | XXCXACXXUAXAUUAUGGGCAG |
| | | | | UGUGACCXCXCC-invdT |
| 146 | 628 | 269 | 10U | CXAC-Z-CCGCGCGGAGGCUUG |
| | | | | AGGUAGCCGUUUXUCX-UUUUU |
| | | | | UUUUU-XXCXACXXUAXAUUAU |
| | | | | GGGCAGUGUGACCXCXCC- |
| | | | | invdT |
| 147 | 269 | 628 | none | XXCXACXXUAXAUUAUGGGCAG |
| 435 | | | | UGUGACCXCXCC-CXAC-Z-CC |
| | | | | GCGCGGAGGCUUGAGGUAGCCG |
| | | | | UUUXUCX-invdT |
| 148 | 269 | 628 | Z | XXCXACXXUAXAUUAUGGGCAG |
| 436 | | | | UGUGACCXCXCC-Z-CXAC-Z- |
| | | | | CCGCGCGGAGGCUUGAGGUAGC |
| | | | | CGUUUXUCX-invdT |
| 149 | 269 | 628 | S18 | XXCXACXXUAXAUUAUGGGCAG |
| 437 | | | | UGUGACCXCXCC-S18-CXAC- |
| | | | | Z-CCGCGCGGAGGCUUGAGGUA |
| | | | | GCCGUUUXUCX-invdT |
| 150 | 269 | 628 | 5U | XXCXACXXUAXAUUAUGGGCAG |
| 438 | | | | UGUGACCXCXCC-UUUUU-CXA |
| | | | | C-Z-CCGCGCGGAGGCUUGAGG |
| | | | | UAGCCGUUUXUCX-invdT |
| 151 | 269 | 628 | 10U | XXCXACXXUAXAUUAUGGGCAG |
| 442 | | | | UGUGACCXCXCC-UUUUUUUUU |
| | | | | U-CXAC-Z-CCGCGCGGAGGCU |
| | | | | UGAGGUAGCCGUUUXUCX- |
| | | | | invdT |

Where A, C and U are 2′OMe, X is 2′Ome G, G is 2′F G, Z is a 1,3-propanediolspacer, S18 is hexaethyleneglycol and -invdT is an inverted dT residue.
Sequences in bold indicate base pairs added to stabilize a terminal stem and a dash (-) is used to flank the linker.

[0211] Shown in Table 12, an extended version of aptamer 628, 628ex with an inverted T (SEQ ID NO: 152) that contains two additional base pairs to stabilize the closing stem is combined with aptamer 269 with an inverted T (SEQ ID NO: 56) using no intervening linker (SEQ ID NO: 439), a non-nucleotide linker comprised of a 3-carbon non-nucleotidyl 1,3-propanediol spacer (Z) (SEQ ID NOS: 163 and 391), a non-nucleotide linker comprised of a hexaethylene glycol spacer (S18) (SEQ ID NOS: 164 and 434), a nucleotide linker comprised of five 2′OMe deoxyuridine residues (5U) (SEQ ID NO: 440), or a nucleotide linker comprised of ten 2′OMe deoxyuridine residues (10U) (SEQ ID NO: 441). The order of the aptamer domains is also varied (SEQ ID NOS: 73 and 302; SEQ ID NOS: 74 and 302; SEQ ID NOS: 76 and 302; SEQ ID NOS: 77 and 302).

TABLE 12

| SEQ | | | | |
|---|---|---|---|---|
| ID | | | | |
| NO | 5′Apt | 3′Apt | Linker | Sequence |
| 152 | 628ex | n/a | n/a | XCCXAC-Z- |
| | | | | CCGCGCGGAGGCUUGAGGUAGCCGU |
| | | | | UUXUCXXC-invdT |
| 56 | 269 | n/a | n/a | XXCXACXXUAXAUUAUGGGCAGUGU |
| | | | | GACCXCXCC-invdT |
| 439 | 628ex | 269 | none | XCCXAC-Z- |
| | | | | CCGCGCGGAGGCUUGAGGUAGCCGU |
| | | | | UUXUCXXC-XXCXACXXUAXAUUAU |
| | | | | GGGCAGUGUGACCXCXCC-invdT |
| 163 | 628ex | 269 | Z | XCCXAC-Z- |
| 391 | | | | CCGCGCGGAGGCUUGAGGUAGCCGU |
| | | | | UUXUCXXC-Z-XXCXACXXUAXAUU |
| | | | | AUGGGCAGUGUGACCXCXCC- |
| | | | | invdT |
| 164 | 628ex | 269 | S18 | XCCXAC-Z- |
| 434 | | | | CCGCGCGGAGGCUUGAGGUAGCCGU |
| | | | | UUXUCXXC-S18-XXCXACXXUAXA |
| | | | | UUAUGGGCAGUGUGACCXCXCC- |
| | | | | invdT |
| 440 | 628ex | 269 | 5U | XCCXAC-Z- |
| | | | | CCGCGCGGAGGCUUGAGGUAGCCGU |
| | | | | UUXUCXXC-UUUUU-XXCXACXXUA |
| | | | | XAUUAUGGGCAGUGUGACCXCXCC- |
| | | | | invdT |
| 441 | 628ex | 269 | 10U | XCCXAC-Z- |
| | | | | CCGCGCGGAGGCUUGAGGUAGCCGU |
| | | | | UUXUCXXC-UUUUUUUUUU-XXCXA |
| | | | | CXXUAXAUUAUGGGCAGUGUGACCX |
| | | | | CXCC-invdT |
| 73 | 269 | 628ex | none | XXCXACXXUAXAUUAUGGGCAGUGU |
| 302 | | | | GACCXCXCC-XCCXAC-Z-CCGCGC |
| | | | | GGAGGCUUGAGGUAGCCGUUUXUCX |
| | | | | XC-invdT |
| 74 | 269 | 628ex | Z | XXCXACXXUAXAUUAUGGGCAGUGU |
| 302 | | | | GACCXCXCC-Z-XCCXAC-Z-CCGC |
| | | | | GCGGAGGCUUGAGGUAGCCGUUUXU |
| | | | | CXXC-invdT |
| 149 | 269 | 628ex | S18 | XXCXACXXUAXAUUAUGGGCAGUGU |
| 302 | | | | GACCXCXCC-S18-XCCXAC-Z-CC |
| | | | | GCGCGGAGGCUUGAGGUAGCCGUUU |
| | | | | XUCXXC-invdT |
| 76 | 269 | 628ex | 5U | XXCXACXXUAXAUUAUGGGCAGUGU |
| 302 | | | | GACCXCXCC-UUUUU-XCCXAC-Z- |
| | | | | CCGCGCGGAGGCUUGAGGUAGCCGU |
| | | | | UUXUCXXC-invdT |
| 77 | 269 | 628ex | 10U | XXCXACXXUAXAUUAUGGGCAGUGU |
| 302 | | | | GACCXCXCC-UUUUUUUUUU-XCCX |
| | | | | AC-Z-CCGCGCGGAGGCUUGAGGUA |
| | | | | GCCGUUUXUCXXC-invdT |

Where A, C and U are 2′OMe, X is 2′Ome G, G is 2′F G, Z is a 1,3-propanediolspacer, S18 is hexaethyleneglycol and -invdT is an inverted dT residue.
Sequences in bold indicate base pairs added to stabilize a terminal stem and a dash (-) is used to flank the linker.

[0212] Shown in Table 13, the extended version of 269, 269ex with an inverted T (SEQ ID NO: 78) is combined with aptamer 628 with an inverted T (SEQ ID NO: 141) using no intervening linker (SEQ ID NO: 152), a non-nucleotide linker comprised of a 3-carbon non-nucleotidyl 1,3-propanediol spacer (Z) (SEQ ID NOS: 153 and 303), a non-nucleotide linker comprised of a hexaethylene glycol spacer (S18) (SEQ ID NOS: 154 and 304), a nucleotide linker comprised of five 2′OMe deoxyuridine residues (5U) (SEQ ID NO: 155), or a nucleotide linker comprised of ten 2′OMe deoxyuridine residues (10U) (SEQ ID NO: 156). The order of the aptamer domains is also varied (SEQ ID NOS: 157 and 305; SEQ ID NOS: 158 and 306; SEQ ID NOS: 159 and 307; SEQ ID NOS: 160 and 308; and SEQ ID NOS: 161 and 309).

TABLE 13

| SEQ | | | | |
|---|---|---|---|---|
| ID | | | | |
| NO | 5′Apt | 3′Apt | Linker | Sequence |
| 141 | 628 | n/a | n/a | CXAC-Z-CCGCGCGGAGGCUUG |
| | | | | AGGUAGCCGUUUXUCX-invdT |
| 78 | 269ex | n/a | n/a | XCXXCXACXXUAXAUUAUGGGC |
| | | | | AGUGUGACCXCXCCXC-invdT |
| 152 | 628 | 269ex | none | CXAC-Z-CCGCGCGGAGGCUUG |
| | | | | AGGUAGCCGUUUXUCX-XCXXC |
| | | | | XACXXUAXAUUAUGGGCAGUGU |
| | | | | GACCXCXCCXC-invdT |
| 153 | 628 | 269ex | Z | CXAC-Z-CCGCGCGGAGGCUUG |
| 303 | | | | AGGUAGCCGUUUXUCX-Z-XCX |
| | | | | XCXACXXUAXAUUAUGGGCAGU |
| | | | | GUGACCXCXCCXC-invdT |
| 154 | 628 | 269ex | S18 | CXAC-Z-CCGCGCGGAGGCUUG |
| 304 | | | | AGGUAGCCGUUUXUCX-S18-X |
| | | | | CXXCXACXXUAXAUUAUGGGCA |
| | | | | GUGUGACCXCXCCXC-invdT |
| 155 | 628 | 269ex | 5U | CXAC-Z-CCGCGCGGAGGCUUG |
| | | | | AGGUAGCCGUUUXUCX-UUUUU- |
| | | | | XCXXCXACXXUAXAUUAUGGGC |
| | | | | AGUGUGACCXCXCCXC-invdT |
| 156 | 628 | 269ex | 10U | CXAC-Z-CCGCGCGGAGGCUUG |
| | | | | AGGUAGCCGUUUXUCX-UUUUU |
| | | | | UUUUU-XCXXCXACXXUAXAUU |
| | | | | AUGGGCAGUGUGACCXCXCCXC- |
| | | | | invdT |
| 157 | 269ex | 628 | none | XXCXACXXUAXAUUAUGGGCAG |
| 305 | | | | UGUGACCXCXCC-CXAC-Z-CC |
| | | | | GCGCGGAGGCUUGAGGUAGCCG |
| | | | | UUUXUCX-invdT |
| 158 | 269ex | 628 | Z | XCXXCXACXXUAXAUUAUGGGC |
| 306 | | | | AGUGUGACCXCXCCXC-Z-CXA |
| | | | | C-Z-CCGCGCGGAGGCUUGAGG |
| | | | | UAGCCGUUUXUCX-invdT |
| 159 | 269ex | 628 | S18 | XCXXCXACXXUAXAUUAUGGGC |
| 307 | | | | AGUGUGACCXCXCCXC-S18-C |
| | | | | XAC-Z-CCGCGCGGAGGCUUGA |
| | | | | GGUAGCCGUUUXUCX-invdT |
| 160 | 269ex | 628 | 5U | XXCXCXACXXUAXAUUAUGGGC |
| 308 | | | | AGUGUGACCXCXCCXC-UUUUU- |
| | | | | CXAC-Z-CCGCGCGGAGGCUUG |
| | | | | AGGUAGCCGUUUXUCX-invdT |
| 161 | 269ex | 628 | 10U | XCXXCXACXXUAXAUUAUGGGC |
| 309 | | | | AGUGUGACCXCXCCXC-UUUUU |
| | | | | UUUUU-CXAC-Z-CCGCGCGGA |
| | | | | GGCUUGAGGUAGCCGUUUXUCX- |
| | | | | invdT |

Where A, C and U are 2′OMe, X is 2′Ome G, G is 2′F G, Z is a 1,3-propanediolspacer, S18 is hexaethyleneglycol and -invdT is an inverted dT residue.
Sequences in bold indicate base pairs added to stabilize a terminal stem and a dash (-) is used to flank the linker.

[0213] Shown in Table 14, the extended version of aptamer 628, 628ex with an inverted T (SEQ ID NO: 152) is combined with the extended version of aptamer 269, 269ex with an inverted T (SEQ ID NO: 78) using no intervening linker (SEQ ID NO: 162), a non-nucleotide linker comprised of a 3-carbon non-nucleotidyl 1,3-propanediol spacer (Z) (SEQ ID NOS: 163 and 310), a non-nucleotide linker comprised of a hexaethylene glycol spacer (S18) (SEQ ID NOS: 164 and 311), a nucleotide linker comprised of five 2′OMe deoxyuridine residues (5U) (SEQ ID NOS: 165 and 312), or a nucleotide linker comprised of ten 2′OMe deoxyuridine residues (10U) (SEQ ID NO: 166). The order of the aptamer domains is also varied (SEQ ID NOS: 167 and 313; SEQ ID NOS: 168 and 314; SEQ ID NOS: 169 and 315; SEQ ID NOS: 170 and 316; and SEQ ID NOS: 171-317).

TABLE 14

| SEQ | | | | |
|---|---|---|---|---|
| ID | | | | |
| NO | 5′Apt | 3′Apt | Linker | Sequence |
| 152 | 628ex | n/a | n/a | XCCXAC-Z- |
| | | | | CCGCGCGGAGGCUUGAGGUA |
| | | | | GCCGUUUXUCXXC-invdT |
| 78 | 269ex | n/a | n/a | XCXXCXACXXUAXAUUAUGG |
| | | | | GCAGUGUGACCXCXCCXC- |
| | | | | invdT |
| 162 | 628ex | 269ex | none | XCCXAC-Z- |
| | | | | CCGCGCGGAGGCUUGAGGUA |
| | | | | GCCGUUUXUCXXC-XCXXCX |
| | | | | ACXXUAXAUUAUGGGCAGUG |
| | | | | UGACCXCXCCXC-invdT |
| 163 | 628ex | 269ex | Z | XCCXAC-Z- |
| 310 | | | | CCGCGCGGAGGCUUGAGGUA |
| | | | | GCCGUUUXUCXXC-Z-XCXX |
| | | | | CXACXXUAXAUUAUGGGCAG |
| | | | | UGUGACCXCXCCXC-invdT |
| 164 | 628ex | 269ex | S18 | XCCXAC-Z- |
| 311 | | | | CCGCGCGGAGGCUUGAGGUA |
| | | | | GCCGUUUXUCXXC-S18-XC |
| | | | | XXCXACXXUAXAUUAUGGGC |
| | | | | AGUGUGACCXCXCCXC- |
| | | | | invdT |
| 165 | 628ex | 269ex | 5U | XCCXAC-Z- |
| 312 | | | | CCGCGCGGAGGCUUGAGGUA |
| | | | | GCCGUUUXUCXXC-UUUUU- |
| | | | | XCXXCXACXXUAXAUUAUGG |
| | | | | GCAGUGUGACCXCXCCXC- |
| | | | | invdT |
| 166 | 628ex | 269ex | 10U | XCCXAC-Z- |
| | | | | CCGCGCGGAGGCUUGAGGUA |
| | | | | GCCGUUUXUCXXC-UUUUUU |
| | | | | UUUU-XCXXCXACXXUAXAU |
| | | | | UAUGGGCAGUGUGACCXCXC |
| | | | | CXC-invdT |
| 167 | 269ex | 628ex | none | XCXXCXACXXUAXAUUAUGG |
| 313 | | | | GCAGUGUGACCXCXCCXC-X |
| | | | | CCXAC-Z-CCGCGCGGAGGC |
| | | | | UUGAGGUAGCCGUUUXUCXX |
| | | | | C-invdT |
| 168 | 269ex | 628ex | Z | XCXXCXACXXUAXAUUAUGG |
| 314 | | | | GCAGUGUGACCXCXCCXC-X |
| | | | | CCXAC-Z-CCGCGCGGAGGC |
| | | | | UUGAGGUAGCCGUUUXUCXX |
| | | | | C-invdT |
| 169 | 269ex | 628ex | S18 | XCXXCXACXXUAXAUUAUGG |
| 315 | | | | GCAGUGUGACCXCXCCXC-X |
| | | | | CCXAC-Z-CCGCGCGGAGGC |
| | | | | UUGAGGUAGCCGUUUXUCXX |
| | | | | C-invdT |
| 170 | 269ex | 628ex | 5U | XCXXCXACXXUAXAUUAUGG |
| 316 | | | | GCAGUGUGACCXCXCCXC-U |
| | | | | UUUU-XCCXAC-Z-CCGCGC |
| | | | | GGAGGCUUGAGGUAGCCGUU |
| | | | | UXUCXXC-invdT |
| 171 | 269ex | 628ex | 10U | XCXXCXACXXUAXAUUAUGG |
| 317 | | | | GCAGUGUGACCXCXCCXC-U |
| | | | | UUUUUUUUU-XCCXAC-Z-C |
| | | | | CGCGCGGAGGCUUGAGGUAG |
| | | | | CCGUUUXUCXXC-invdT |

Where A, C and U are 2′OMe, X is 2′Ome G, G is 2′F G, Z is a 1,3-propanediolspacer, S18 is hexaethyleneglycol and -invdT is an inverted dT residue.
Sequences in bold indicate base pairs added to stabilize a terminal stem and a dash (-) is used to flank the linker.

[0214] Shown in Table 15 are bispecific aptamers generated using the anti-VEGF aptamer, aptamer 285 with an inverted T (SEQ ID NO: 55), and the anti-IL8 aptamer, aptamer 248 with an inverted T (SEQ ID NO: 172) were linked with no intervening linker (SEQ ID NO: 173), a non-nucleotide linker comprised of a 3-carbon non-nucleotidyl 1,3-propanediol spacer (Z) (SEQ ID NOS: 174 and 318), a non-nucleotide linker comprised of a hexaethylene glycol spacer (S18) (SEQ ID NOS: 175 and 319), a nucleotide linker comprised of five 2′ OMe deoxyuridine residues (5U) (SEQ ID NO: 176), or a nucleotide linker comprised of ten 2′ OMe deoxyuridine residues (10U) (SEQ ID NO: 177). The order of the aptamer domains is also varied (SEQ ID NOS: 178 and 320; SEQ ID NOS 179 and 321; SEQ ID NOS 180 and 322; SEQ ID NOS 181 and 323; and SEQ ID NOS 182 and 324).

TABLE 15

| SEQ | | | | |
|---|---|---|---|---|
| ID | | | | |
| NO | 5′Apt | 3′Apt | Linker | Sequence |
| 55 | 285 | n/a | n/a | CXAC-Z-CCGCGCGGAGGG- |
| | | | | XUUUCAUAAUCCCGUUUXUC |
| | | | | X-invdT |
| 172 | 248 | n/a | n/a | XCXXUGGGAAAUGUGAGAUG |
| | | | | GGUUXCCXC-invdT |
| 173 | 285 | 248 | none | CXAC-Z-CCGCGCGGAGGGX |
| | | | | UUUCAUAAUCCCGUUUXUCX- |
| | | | | XCXXUGGGAAAUGUGAGAUG |
| | | | | GGUUXCCXC-invdT |
| 174 | 285 | 248 | Z | CXAC-Z-CCGCGCGGAGGGX |
| 318 | | | | UUUCAUAAUCCCGUUUXUCX- |
| | | | | Z-XCXXUGGGAAAUGUGAGA |
| | | | | UGGGUUXCCXC-invdT |
| 175 | 285 | 248 | S18 | CXAC-Z-CCGCGCGGAGGGX |
| 319 | | | | UUUCAUAAUCCCGUUUXUCX- |
| | | | | S18-XCXXUGGGAAAUGUGA |
| | | | | GAUGGGUUXCCXC-invdT |
| 176 | 285 | 248 | 5U | CXAC-Z-CCGCGCGGAGGGX |
| | | | | UUUCAUAAUCCCGUUUXUCX- |
| | | | | UUUUU-XCXXUGGGAAAUGU |
| | | | | GAGAUGGGUUXCCXC-invdT |
| 177 | 285 | 248 | 10U | CXAC-Z-CCGCGCGGAGGGX |
| | | | | UUUCAUAAUCCCGUUUXUCX- |
| | | | | UUUUUUUUUU-XCXXUGGGA |
| | | | | AAUGUGAGAUGGGUUXCCXC- |
| | | | | invdT |
| 178 | 248 | 285 | none | XCXXUGGGAAAUGUGAGAUG |
| 320 | | | | GGUUXCCXC-CXAC-Z-CCG |
| | | | | CGCGGAGGGXUUUCAUAAUC |
| | | | | CCGUUUXUCX-invdT |
| 179 | 248 | 285 | Z | XCXXUGGGAAAUGUGAGAUG |
| 321 | | | | GGUUXCCXC-Z-CXAC-Z-C |
| | | | | CGCGCGGAGGGXUUUCAUAA |
| | | | | UCCCGUUUXUCX-invdT |
| 180 | 248 | 285 | S18 | XCXXUGGGAAAUGUGAGAUG |
| 322 | | | | GGUUXCCXC-S18-CXAC-Z- |
| | | | | CCGCGCGGAGGGXUUUCAUA |
| | | | | AUCCCGUUUXUCX-invdT |
| 181 | 248 | 285 | 5U | XCXXUGGGAAAUGUGAGAUG |
| 323 | | | | GGUUXCCXC-UUUUU-CXAC- |
| | | | | Z-CCGCGCGGAGGGXUUUCA |
| | | | | UAAUCCCGUUUXUCX-invdT |
| 182 | 248 | 285 | 10U | XCXXUGGGAAAUGUGAGAUG |
| 324 | | | | GGUUXCCXC-UUUUUUUUUU- |
| | | | | CXAC-Z-CCGCGCGGAGGGX |
| | | | | UUUCAUAAUCCCGUUUXUCX- |
| | | | | invdT |

Where A, C and U are 2′OMe, X is 2′Ome G, G is 2′F G, Z is a 1,3-propanediolspacer, S18 is hexaethyleneglycol and -invdT is an inverted dT residue.
Sequences in bold indicate base pairs added to stabilize a terminal stem and a dash (-) is used to flank the linker.

[0215] Shown in Table 16, the extended version of 285, 285ex with an inverted T (SEQ ID NO: 67) can be combined with aptamer 248 with an inverted T (SEQ ID: 172) using no intervening linker (SEQ ID NO: 183), a non-nucleotide linker comprised of a 3-carbon non-nucleotidyl 1,3-propanediol spacer (Z) (SEQ ID NOS: 184 and 325), a non-nucleotide linker comprised of a hexaethylene glycol spacer (S18) (SEQ ID NOS: 185 and 326), a nucleotide linker comprised of five 2′OMe deoxyuridine residues (5U) (SEQ ID NO: 186), or a nucleotide linker comprised of ten 2′OMe deoxyuridine residues (10U) (SEQ ID NO: 187). The order of the aptamer domains is also varied (SEQ ID NOS: 188 and 327; SEQ ID NOS: 189 and 328; SEQ ID NOS: 190 and 329; SEQ ID NOS: 191 and 330; and SEQ ID NOS: 192 and 331).

TABLE 16

| SEQ | | | | |
|---|---|---|---|---|
| ID | | | | |
| NO | 5′Apt | 3′Apt | Linker | Sequence |
| 67 | 285ex | n/a | n/a | XCCXAC-Z- |
| | | | | CCGCGCGGAGGGXUUUCAUAA |
| | | | | UCCCGUUUXUCXXC-invdT |
| 172 | 248 | n/a | n/a | XCXXUGGGAAAUGUGAGAUGG |
| | | | | GUUXCCXC-invdT |
| 183 | 285ex | 248 | none | XCCXAC-Z- |
| | | | | CCGCGCGGAGGGXUUUCAUAA |
| | | | | UCCCGUUUXUCXXC-XCXXUG |
| | | | | GGAAAUGUGAGAUGGGUUXCC |
| | | | | XC-invdT |
| 184 | 285ex | 248 | Z | XCCXAC-Z- |
| 325 | | | | CCGCGCGGAGGGXUUUCAUAA |
| | | | | UCCCGUUUXUCXXC-Z-XCXX |
| | | | | UGGGAAAUGUGAGAUGGGUUX |
| | | | | CCXC-invdT |
| 185 | 285ex | 248 | S18 | XCCXAC-Z- |
| 326 | | | | CCGCGCGGAGGGXUUUCAUAA |
| | | | | UCCCGUUUXUCXXC-S18-XC |
| | | | | XXUGGGAAAUGUGAGAUGGGU |
| | | | | UXCCXC-invdT |
| 186 | 285ex | 248 | 5U | XCCXAC-Z- |
| | | | | CCGCGCGGAGGGXUUUCAUAA |
| | | | | UCCCGUUUXUCXXC-UUUUU- |
| | | | | XCXXUGGGAAAUGUGAGAUGG |
| | | | | GUUXCCXC-invdT |
| 187 | 285ex | 248 | 10U | XCCXAC-Z- |
| | | | | CCGCGCGGAGGGXUUUCAUAA |
| | | | | UCCCGUUUXUCXXC-UUUUUU |
| | | | | UUUU-XCXXUGGGAAAUGUGA |
| | | | | GAUGGGUUXCCXC-invdT |
| 188 | 248 | 285ex | none | XCXXUGGGAAAUGUGAGAUGG |
| 327 | | | | GUUXCCXC-XCCXAC-Z-CCG |
| | | | | CGCGGAGGGXUUUCAUAAUCC |
| | | | | CGUUUXUCXXC-invdT |
| 189 | 248 | 285ex | Z | XCXXUGGGAAAUGUGAGAUGG |
| 328 | | | | GUUXCCXC-Z-XCCXAC-Z-C |
| | | | | CGCGCGGAGGGXUUUCAUAAU |
| | | | | CCCGUUUXUCXXC-invdT |
| 190 | 248 | 285ex | S18 | XCXXUGGGAAAUGUGAGAUGG |
| 329 | | | | GUUXCCXC-S18-XCCXAC-Z- |
| | | | | CCGCGCGGAGGGXUUUCAUAA |
| | | | | UCCCGUUUXUCXXC-invdT |
| 191 | 248 | 285ex | 5U | XCXXUGGGAAAUGUGAGAUGG |
| 330 | | | | GUUXCCXC-UUUUU-XCCXAC- |
| | | | | Z-CCGCGCGGAGGGXUUUCAU |
| | | | | AAUCCCGUUUXUCXXC-invdT |
| 192 | 248 | 285ex | 10U | XCXXUGGGAAAUGUGAGAUGG |
| 331 | | | | GUUXCCXC-UUUUUUUUUU-X |
| | | | | CCXAC-Z-CCGCGCGGAGGGX |
| | | | | UUUCAUAAUCCCGUUUXUCXX |
| | | | | C-invdT |

Where A, C and U are 2′OMe, X is 2′Ome G, G is 2′F G, Z is a 1,3-propanediolspacer, S18 is hexaethyleneglycol and -invdT is an inverted dT residue.
Sequences in bold indicate base pairs added to stabilize a terminal stem and a dash (-) is used to flank the linker.

[0216] Shown in Table 17, the extended version of 248, 248ex with an inverted T (SEQ ID NO: 193) can be combined with aptamer 285 with an inverted T (SEQ ID NO: 55) using no intervening linker (SEQ ID NO: 194), a non-nucleotide linker comprised of a 3-carbon non-nucleotidyl 1,3-propanediol spacer (Z) (SEQ ID NOS: 195 and 332), a non-nucleotide linker comprised of a hexaethylene glycol spacer (S18) (SEQ ID NOS: 196 and 333), a nucleotide linker comprised of five 2′OMe deoxyuridine residues (5U) (SEQ ID NO: 197), or a nucleotide linker comprised of ten 2′OMe deoxyuridine residues (10U) (SEQ ID NO: 198). The order of the aptamer domains is also varied (SEQ ID NOS: 199 and 334; SEQ ID NOS: 200 and 335; SEQ ID NOS: 201 and 336; SEQ ID NOS: 202 and 337; and SEQ ID NOS: 203 and 338).

TABLE 17

| SEQ | | | | |
|---|---|---|---|---|
| ID | | | | |
| NO | 5′Apt | 3′Apt | Linker | Sequence |
| 55 | 285 | n/a | n/a | CXAC-Z-CCGCGCGGAGGGXUUU |
| | | | | CAUAAUCCCGUUUXUCX-invdT |
| 193 | 248ex | n/a | n/a | XCXCXXUGGGAAAUGUGAGAUGG |
| | | | | GUUXCCXCXC-invdT |
| 194 | 285 | 248ex | none | CXAC-Z-CCGCGCGGAGGGXUUU |
| | | | | CAUAAUCCCGUUUXUCX-XCXCX |
| | | | | XUGGGAAAUGUGAGAUGGGUUXC |
| | | | | CXCXC-invdT |
| 195 | 285 | 248ex | Z | CXAC-Z-CCGCGCGGAGGGXUUU |
| 332 | | | | CAUAAUCCCGUUUXUCX-Z-XCX |
| | | | | CXXUGGGAAAUGUGAGAUGGGUU |
| | | | | XCCXCXC-invdT |
| 196 | 285 | 248ex | S18 | CXAC-Z-CCGCGCGGAGGGXUUU |
| 333 | | | | CAUAAUCCCGUUUXUCX-S18-X |
| | | | | CXCXXUGGGAAAUGUGAGAUGGG |
| | | | | UUXCCXCXC-invdT |
| 197 | 285 | 248ex | 5U | CXAC-Z-CCGCGCGGAGGGXUUU |
| | | | | CAUAAUCCCGUUUXUCX-UUUUU- |
| | | | | XCXCXXUGGGAAAUGUGAGAUGG |
| | | | | GUUXCCXCXC-invdT |
| 198 | 285 | 248ex | 10U | CXAC-Z-CCGCGCGGAGGGXUUU |
| | | | | CAUAAUCCCGUUUXUCX-UUUUU |
| | | | | UUUUU-XCXCXXUGGGAAAUGUG |
| | | | | AGAUGGGUUXCCXCXC-invdT |
| 199 | 248ex | 285 | none | XCXCXXUGGGAAAUGUGAGAUGG |
| 334 | | | | GUUXCCXCXC-CXAC-Z-CCGCG |
| | | | | CGGAGGGXUUUCAUAAUCCCGUU |
| | | | | UXUCX-invdT |
| 200 | 248ex | 285 | Z | XCXCXXUGGGAAAUGUGAGAUGG |
| 335 | | | | GUUXCCXCXC-Z-CXAC-Z-CCG |
| | | | | CGCGGAGGGXUUUCAUAAUCCCG |
| | | | | UUUXUCX-invdT |
| 201 | 248ex | 285 | S18 | XCXCXXUGGGAAAUGUGAGAUGG |
| 336 | | | | GUUXCCXCXC-S18-CXAC-Z-C |
| | | | | CGCGCGGAGGGXUUUCAUAAUCC |
| | | | | CGUUUXUCX-invdT |
| 202 | 248ex | 285 | 5U | XCXCXXUGGGAAAUGUGAGAUGG |
| 337 | | | | GUUXCCXCXC-UUUUU-CXAC-Z- |
| | | | | CCGCGCGGAGGGXUUUCAUAAUC |
| | | | | CCGUUUXUCX-invdT |
| 203 | 248ex | 285 | 10U | XCXCXXUGGGAAAUGUGAGAUGG |
| 338 | | | | GUUXCCXCXC-UUUUUUUUUU-C |
| | | | | XAC-Z-CCGCGCGGAGGGXUUUC |
| | | | | AUAAUCCCGUUUXUCX-invdT |

Where A, C and U are 2′OMe, X is 2′Ome G, G is 2′F G, Z is a 1,3-propanediolspacer, S18 is hexaethyleneglycol and -invdT is an inverted dT residue.
Sequences in bold indicate base pairs added to stabilize a terminal stem and a dash (-) is used to flank the linker.

[0217] Shown in Table 18, the extended version of 285, 285ex with an inverted T (SEQ ID NO: 67) can be combined with the extended version of aptamer 248, 248ex with an inverted T (SEQ ID NO: 193) using no intervening linker (SEQ ID NO: 204), a non-nucleotide linker comprised of a 3-carbon non-nucleotidyl 1,3-propanediol spacer (Z) (SEQ ID NOS: 205 and 339), a non-nucleotide linker comprised of a hexaethylene glycol spacer (S18) (SEQ ID NOS: 206 and 340), a nucleotide linker comprised of five 2′OMe deoxyuridine residues (5U) (SEQ ID NO: 207), or a nucleotide linker comprised of ten 2′OMe deoxyuridine residues (10U) (SEQ ID NO: 208). The order of the aptamer is also varied (SEQ ID NOS: 209 and 341; SEQ ID NOS: 210 and 342; SEQ ID NOS: 211 and 343; SEQ ID NOS: 212 and 344; and SEQ ID NOS: 213 and 345).

TABLE 18

| SEQ | | | | |
|---|---|---|---|---|
| ID | | | | |
| NO | 5′Apt | 3′Apt | Linker | Sequence |
| 67 | 285ex | n/a | n/a | XCCXAC-Z- |
| | | | | CCGCGCGGAGGGXUUUCAUAA |
| | | | | UCCCGUUUXUCXXC-invdT |
| 193 | 248ex | n/a | n/a | XCXCXXUGGGAAAUGUGAGAU |
| | | | | GGGUUXCCXCXC-invdT |
| 204 | 285ex | 248ex | none | XCCXAC-Z- |
| | | | | CCGCGCGGAGGGXUUUCAUAA |
| | | | | UCCCGUUUXUCXXC-XCXCXX |
| | | | | UGGGAAAUGUGAGAUGGGUUX |
| | | | | CCXCXC-invdT |
| 205 | 285ex | 248ex | Z | XCCXAC-Z- |
| 339 | | | | CCGCGCGGAGGGXUUUCAUAA |
| | | | | UCCCGUUUXUCXXC-Z-XCXC |
| | | | | XXUGGGAAAUGUGAGAUGGGU |
| | | | | UXCCXCXC-invdT |
| 206 | 285ex | 248ex | S18 | XCCXAC-Z- |
| 340 | | | | CCGCGCGGAGGGXUUUCAUAA |
| | | | | UCCCGUUUXUCXXC-S18-XC |
| | | | | XCXXUGGGAAAUGUGAGAUGG |
| | | | | GUUXCCXCXC-invdT |
| 207 | 285ex | 248ex | 5U | XCCXAC-Z- |
| | | | | CCGCGCGGAGGGXUUUCAUAA |
| | | | | UCCCGUUUXUCXXC-UUUUU- |
| | | | | XCXCXXUGGGAAAUGUGAGAU |
| | | | | GGGUUXCCXCXC-invdT |
| 208 | 285ex | 248ex | 10U | XCCXAC-Z- |
| | | | | CCGCGCGGAGGGXUUUCAUAA |
| | | | | UCCCGUUUXUCXXC-UUUUUU |
| | | | | UUUU-XCXCXXUGGGAAAUGU |
| | | | | GAGAUGGGUUXCCXCXC- |
| | | | | invdT |
| 209 | 248ex | 285ex | none | XCXCXXUGGGAAAUGUGAGAU |
| 341 | | | | GGGUUXCCXCXC-XCCXAC-Z- |
| | | | | CCGCGCGGAGGGXUUUCAUAA |
| | | | | UCCCGUUUXUCXXC-invdT |
| 210 | 248ex | 285ex | Z | XCXCXXUGGGAAAUGUGAGAU |
| 342 | | | | GGGUUXCCXCXC-Z-XCCXAC- |
| | | | | Z-CCGCGCGGAGGGXUUUCAU |
| | | | | AAUCCCGUUUXUCXXC-invdT |
| 211 | 248ex | 285ex | S18 | XCXCXXUGGGAAAUGUGAGAU |
| 343 | | | | GGGUUXCCXCXC-S18-XCCX |
| | | | | AC-Z-CCGCGCGGAGGGXUUU |
| | | | | CAUAAUCCCGUUUXUCXXC- |
| | | | | invdT |
| 212 | 248ex | 285ex | 5U | XCXCXXUGGGAAAUGUGAGAU |
| 344 | | | | GGGUUXCCXCXC-UUUUU-XC |
| | | | | CXAC-Z-CCGCGCGGAGGGXU |
| | | | | UUCAUAAUCCCGUUUXUCXXC- |
| | | | | invdT |
| 213 | 248ex | 285ex | 10U | XCXCXXUGGGAAAUGUGAGAU |
| 345 | | | | GGGUUXCCXCXC-UUUUUUUU |
| | | | | UU-XCCXAC-Z-CCGCGCGGA |
| | | | | GGGXUUUCAUAAUCCCGUUUX |
| | | | | UCXXC-invdT |

Where A, C and U are 2′OMe, X is 2′Ome G, G is 2′F G, Z is a 1,3-propanediolspacer, S18 is hexaethyleneglycol and -invdT is an inverted dT residue.
Sequences in bold indicate base pairs added to stabilize a terminal stem and a dash (-) is used to flank the linker.

[0218] Bispecific aptamer designs were extended to include other variants of aptamer 285 which were identified during a selection in which the Loop 4 of the aptamer was randomized. Shown in Table 19 are examples of bispecific aptamers sequences using anti-VEGF aptamer, aptamer 481 with an inverted T (SEQ ID NO: 99), and the anti-IL8 aptamer, aptamer 248 with an inverted T (SEQ ID NO: 172) linked with no intervening linker (SEQ ID NO: 214), a non-nucleotide linker comprised of a 3-carbon non-nucleotidyl 1,3-propanediol spacer (Z) (SEQ ID NO: 215 and 346), a non-nucleotide linker comprised of a hexaethylene glycol spacer (S18) (SEQ ID NOS: 216 and 347), a nucleotide linker comprised of five 2′ OMe deoxyuridine residues (5U) (SEQ ID NO: 217), or a nucleotide linker comprised of ten 2′OMe deoxyuridine residues (10U) (SEQ ID NO: 218). The order of the aptamer domains is also varied (SEQ ID NO: 219; SEQ ID NOS: 220, 348, 349, and 350; and SEQ ID NOS: 221-223).

TABLE 19

| SEQ | | | | |
|---|---|---|---|---|
| ID | | | | |
| NO | 5′Apt | 3′Apt | Linker | Sequence |
| 99 | 481 | n/a | n/a | CXACUCCGCGCGGAGGCUUGA |
| | | | | GGUAGCCGUUUXUCX-invdT |
| 172 | 248 | n/a | n/a | XCXXUGGGAAAUGUGAGAUGG |
| | | | | GUUXCCXC-invdT |
| 214 | 481 | 248 | none | CXACUCCGCGCGGAGGCUUGA |
| | | | | GGUAGCCGUUUXUCX-XCXXU |
| | | | | GGGAAAUGUGAGAUGGGUUXC |
| | | | | CXC-invdT |
| 215 | 481 | 248 | Z | CXACUCCGCGCGGAGGCUUGA |
| 346 | | | | GGUAGCCGUUUXUCX-Z-XCX |
| | | | | XUGGGAAAUGUGAGAUGGGUU |
| | | | | XCCXC-invdT |
| 216 | 481 | 248 | S18 | CXACUCCGCGCGGAGGCUUGA |
| 347 | | | | GGUAGCCGUUUXUCX-S18-X |
| | | | | CXXUGGGAAAUGUGAGAUGGG |
| | | | | UUXCCXC-invdT |
| 217 | 481 | 248 | 5U | CXACUCCGCGCGGAGGCUUGA |
| | | | | GGUAGCCGUUUXUCX-UUUUU- |
| | | | | XCXXUGGGAAAUGUGAGAUGG |
| | | | | GUUXCCXC-invdT |
| 218 | 285 | 248 | 10U | CXACUCCGCGCGGAGGCUUGA |
| | | | | GGUAGCCGUUUXUCX-UUUUU |
| | | | | UUUUU-XCXXUGGGAAAUGUG |
| | | | | AGAUGGGUUXCCXC-invdT |
| 219 | 248 | 481 | none | XCXXUGGGAAAUGUGAGAUGG |
| | | | | GUUXCCXC-CXACUCCGCGCG |
| | | | | GAGGCUUGAGGUAGCCGUUUX |
| | | | | UCX-invdT |
| 220 | 248 | 481 | Z | XCXXUGGGAAAUGUGAGAUGG |
| 348 | | | | GUUXCCXC-Z-CXACUCCGCG |
| 349 | | | | CGGAGGCUUGAGGUAGCCGUU |
| 350 | | | | UXUCX-invdT |
| | | | | XCXXUGGGAAAUGUGAGAUGG |
| | | | | GUUXCCXC-S18-CXACUCCG |
| | | | | CGCGGAGGCUUGAGGUAGCCG |
| | | | | UUUXUCX-invdT |
| 221 | 248 | 481 | S18 | XCXXUGGGAAAUGUGAGAUGG |
| | | | | GUUXCCXC-UUUUU-CXACUC |
| | | | | CGCGCGGAGGCUUGAGGUAGC |
| | | | | CGUUUXUCX-invdT |
| 222 | 248 | 481 | 5U | XCXXUGGGAAAUGUGAGAUGG |
| | | | | GUUXCCXC-UUUUUUUUUU-C |
| | | | | XACUCCGCGCGGAGGCUUGAG |
| | | | | GUAGCCGUUUXUCX-invdT |
| 223 | 248 | 481 | 10U | XCXXUGGGAAAUGUGAGAUGG |
| | | | | GUUXCCXC-CXACUCCGCGCG |
| | | | | GAGGCUUGAGGUAGCCGUUUX |
| | | | | UCX-invdT |

Where A, C and U are 2′OMe, X is 2′Ome G, G is 2′F G, Z is a 1,3-propanediolspacer, S18 is hexaethyleneglycol and -invdT is an inverted dT residue.
Sequences in bold indicate base pairs added to stabilize a terminal stem and a dash (-) is used to flank the linker.

[0219] Shown in Table 20, an extended version of aptamer 48, 481ex with an inverted T (SEQ ID NO: 110) that contains two additional base pairs to stabilize the closing stem is combined with aptamer 248 (SEQ ID NO: 172) using no intervening linker (SEQ ID NO: 224), a non-nucleotide linker comprised of a 3-carbon non-nucleotidyl 1,3-propanediol spacer (Z) (SEQ ID NOS: 225 and 351), a non-nucleotide linker comprised of a hexaethylene glycol spacer (S18) (SEQ ID NOS: 226 and 352), a nucleotide linker comprised of five 2′OMe deoxyuridine residues (5U) (SEQ ID NO: 227), or a nucleotide linker comprised of ten 2′OMe deoxyuridine residues (10U) (SEQ ID NO: 228). The order of the aptamer domains is also varied (SEQ ID NO: 229; SEQ ID NOS: 230 and 353; SEQ ID NOS: 231 and 354; and SEQ ID NOS: 232-233).

TABLE 20

| SEQ | | | | |
|---|---|---|---|---|
| ID | | | | |
| NO | 5′Apt | 3′Apt | Linker | Sequence |
| 110 | 481ex | n/a | n/a | XCCXACUCCGCGCGGAGGCUUGA |
| | | | | GGUAGCCGUUUXUCXXC-invdT |
| 172 | 248 | n/a | n/a | XCXXUGGGAAAUGUGAGAUGGGU |
| | | | | UXCCXC-invdT |
| 224 | 481ex | 248 | none | XCCXACUCCGCGCGGAGGCUUGA |
| | | | | GGUAGCCGUUUXUCXXC-XCXXU |
| | | | | GGGAAAUGUGAGAUGGGUUXCCX |
| | | | | C-invdT |
| 225 | 481ex | 248 | Z | XCCXACUCCGCGCGGAGGCUUGA |
| 351 | | | | GGUAGCCGUUUXUCXXC-Z-XCX |
| | | | | XUGGGAAAUGUGAGAUGGGUUXC |
| | | | | CXC-invdT |
| 226 | 481ex | 248 | S18 | XCCXACUCCGCGCGGAGGCUUGA |
| 352 | | | | GGUAGCCGUUUXUCXXC-S18-X |
| | | | | CXXUGGGAAAUGUGAGAUGGGUU |
| | | | | XCCXC-invdT |
| 227 | 481ex | 248 | 5U | XCCXACUCCGCGCGGAGGCUUGA |
| | | | | GGUAGCCGUUUXUCXXC-UUUUU- |
| | | | | XCXXUGGGAAAUGUGAGAUGGGU |
| | | | | UXCCXC-invdT |
| 228 | 481ex | 248 | 10U | XCCXACUCCGCGCGGAGGCUUGA |
| | | | | GGUAGCCGUUUXUCXXC-UUUUU |
| | | | | UUUUU-XCXXUGGGAAAUGUGAG |
| | | | | AUGGGUUXCCXC-invdT |
| 229 | 248 | 481ex | none | XCXXUGGGAAAUGUGAGAUGGGU |
| | | | | UXCCXC-XCCXACUCCGCGCGGA |
| | | | | GGCUUGAGGUAGCCGUUUXUCXX |
| | | | | C-invdT |
| 230 | 248 | 481ex | Z | XCXXUGGGAAAUGUGAGAUGGGU |
| 353 | | | | UXCCXC-Z-XCCXACUCCGCGCG |
| | | | | GAGGCUUGAGGUAGCCGUUUXUC |
| | | | | XXC-invdT |
| 231 | 248 | 481ex | S18 | XCXXUGGGAAAUGUGAGAUGGGU |
| 354 | | | | UXCCXC-S18-XCCXACUCCGCG |
| | | | | CGGAGGCUUGAGGUAGCCGUUUX |
| | | | | UCXXC-invdT |
| 232 | 248 | 481ex | 5U | XCXXUGGGAAAUGUGAGAUGGGU |
| | | | | UXCCXC-UUUUU-XCCXACUCCG |
| | | | | CGCGGAGGCUUGAGGUAGCCGUU |
| | | | | UXUCXXC-invdT |
| 233 | 248 | 481ex | 10U | XCXXUGGGAAAUGUGAGAUGGGU |
| | | | | UXCCXC-UUUUUUUUUU-XCCXA |
| | | | | CUCCGCGCGGAGGCUUGAGGUAG |
| | | | | CCGUUUXUCXXC-invdT |

Where A, C and U are 2′OMe, X is 2′Ome G, G is 2′F G, Z is a 1,3-propanediolspacer, S18 is hexaethyleneglycol and -invdT is an inverted dT residue.
Sequences in bold indicate base pairs added to stabilize a terminal stem and a dash (-) is used to flank the linker.

[0220] Shown in Table 21, the extended version of 248, 248ex with an inverted T (SEQ ID NO: 193) is combined with aptamer 481 with an inverted T (SEQ ID NO: 99) using no intervening linker (SEQ ID NO: 234), a non-nucleotide linker comprised of a 3-carbon non-nucleotidyl 1,3-propanediol spacer (Z) (SEQ ID NOS: 235 and 355), a non-nucleotide linker comprised of a hexaethylene glycol spacer (S18) (SEQ ID NOS: 236 and 356), a nucleotide linker comprised of five 2′OMe deoxyuridine residues (5U) (SEQ ID NO: 237), or a nucleotide linker comprised of ten 2′OMe deoxyuridine residues (10U) (SEQ ID NO: 238). The order of the aptamer domains is also varied (SEQ ID NO: 239; SEQ ID NOS: 240 and 357; SEQ ID NOS: 241 and 358; SEQ ID NOS: 242-243).

TABLE 21

| SEQ | | | | |
|---|---|---|---|---|
| ID | | | | |
| NO | 5′Apt | 3′Apt | Linker | Sequence |
| 99 | 481 | n/a | n/a | CXACUCCGCGCGGAGGCUUGA |
| | | | | GGUAGCCGUUUXUCX-invdT |
| 193 | 248ex | n/a | n/a | XCXCXXUGGGAAAUGUGAGAU |
| | | | | GGGUUXCCXCXC-invdT |
| 234 | 481 | 248ex | none | CXACUCCGCGCGGAGGCUUGA |
| | | | | GGUAGCCGUUUXUCX-XCXCX |
| | | | | XUGGGAAAUGUGAGAUGGGUU |
| | | | | XCCXCXC-invdT |
| 235 | 481 | 248ex | Z | CXACUCCGCGCGGAGGCUUGA |
| 355 | | | | GGUAGCCGUUUXUCX-Z-XCX |
| | | | | CXXUGGGAAAUGUGAGAUGGG |
| | | | | UUXCCXCXC-invdT |
| 236 | 481 | 248ex | S18 | CXACUCCGCGCGGAGGCUUGA |
| 356 | | | | GGUAGCCGUUUXUCX-S18-X |
| | | | | CXCXXUGGGAAAUGUGAGAUG |
| | | | | GGUUXCCXCXC-invdT |
| 237 | 481 | 248ex | 5U | CXACUCCGCGCGGAGGCUUGA |
| | | | | GGUAGCCGUUUXUCX-UUUUU- |
| | | | | XCXCXXUGGGAAAUGUGAGAU |
| | | | | GGGUUXCCXCXC-invdT |
| 238 | 481 | 248ex | 10U | CXACUCCGCGCGGAGGCUUGA |
| | | | | GGUAGCCGUUUXUCX-UUUUU |
| | | | | UUUUU-XCXCXXUGGGAAAUG |
| | | | | UGAGAUGGGUUXCCXCXC- |
| | | | | invdT |
| 239 | 248ex | 481 | none | XCXXUGGGAAAUGUGAGAUGG |
| | | | | GUUXCCXC-XCCXACUCCGCG |
| | | | | CGGAGGCUUGAGGUAGCCGUU |
| | | | | UXUCXXC-invdT |
| 240 | 248ex | 481 | Z | XCXXUGGGAAAUGUGAGAUGG |
| 357 | | | | GUUXCCXC-Z-XCCXACUCCG |
| | | | | CGCGGAGGCUUGAGGUAGCCG |
| | | | | UUUXUCXXC-invdT |
| 241 | 248ex | 481 | S18 | XCXXUGGGAAAUGUGAGAUGG |
| 358 | | | | GUUXCCXC-S18-XCCXACUC |
| | | | | CGCGCGGAGGCUUGAGGUAGC |
| | | | | CGUUUXUCXXC-invdT |
| 242 | 248ex | 481 | 5U | XCXXUGGGAAAUGUGAGAUGG |
| | | | | GUUXCCXC-UUUUU-XCCXAC |
| | | | | UCCGCGCGGAGGCUUGAGGUA |
| | | | | GCCGUUUXUCXXC-invdT |
| 243 | 248ex | 481 | 10U | XCXXUGGGAAAUGUGAGAUGG |
| | | | | GUUXCCXC-UUUUUUUUUU-X |
| | | | | CCXACUCCGCGCGGAGGCUUG |
| | | | | AGGUAGCCGUUUXUCXXC- |
| | | | | invdT |

Where A, C and U are 2′OMe, X is 2′Ome G, G is 2′F G, Z is a 1,3-propanediolspacer, S18 is hexaethyleneglycol and -invdT is an inverted dT residue.
Sequences in bold indicate base pairs added to stabilize a terminal stem and a dash (-) is used to flank the linker.

[0221] Shown in Table 22, the extended version of 481, 481ex with an inverted T (SEQ ID NO: 110) is combined with the extended version of aptamer 248, 248ex with an inverted T (SEQ ID NO: 193) using no intervening linker (SEQ ID NO: 244), a non-nucleotide linker comprised of a 3-carbon non-nucleotidyl 1,3-propanediol spacer (Z) (SEQ ID NOS: 245 and 359), a non-nucleotide linker comprised of a hexaethylene glycol spacer (S18) (SEQ ID NOS: 246 and 360), a nucleotide linker comprised of five 2′OMe deoxyuridine residues (5U) (SEQ ID NO: 247), or a nucleotide linker comprised of ten 2′OMe deoxyuridine residues (10U) (SEQ ID NO: 248). The order of the aptamer domains is also varied (SEQ ID NOS: 249-253).

TABLE 22

| SEQ | | | | |
|---|---|---|---|---|
| ID | | | | |
| NO | 5′Apt | 3′Apt | Linker | Sequence |
| 110 | 481ex | n/a | n/a | XCCXACUCCGCGCGGAGGCUUGA |
| | | | | GGUAGCCGUUUXUCXXC-invdT |
| 193 | 248ex | n/a | n/a | XCXCXXUGGGAAAUGUGAGAUGG |
| | | | | GUUXCCXCXC-invdT |
| 244 | 481ex | 248ex | none | XCCXACUCCGCGCGGAGGCUUGA |
| | | | | GGUAGCCGUUUXUCXXC-XCXCX |
| | | | | XUGGGAAAUGUGAGAUGGGUUXC |
| | | | | CXCXC-invdT |
| 245 | 481ex | 248ex | Z | XCCXACUCCGCGCGGAGGCUUGA |
| 359 | | | | GGUAGCCGUUUXUCXXC-Z-XCX |
| | | | | CXXUGGGAAAUGUGAGAUGGGUU |
| | | | | XCCXCXC-invdT |
| 246 | 481ex | 248ex | S18 | XCCXACUCCGCGCGGAGGCUUGA |
| 360 | | | | GGUAGCCGUUUXUCXXC-S18-X |
| | | | | CXCXXUGGGAAAUGUGAGAUGGG |
| | | | | UUXCCXCXC-invdT |
| 247 | 481ex | 248ex | 5U | XCCXACUCCGCGCGGAGGCUUGA |
| | | | | GGUAGCCGUUUXUCXXC-UUUUU- |
| | | | | XCXCXXUGGGAAAUGUGAGAUGG |
| | | | | GUUXCCXCXC-invdT |
| 248 | 481ex | 248ex | 10U | XCCXACUCCGCGCGGAGGCUUGA |
| | | | | GGUAGCCGUUUXUCXXC-UUUUU |
| | | | | UUUUU-XCXCXXUGGGAAAUGUG |
| | | | | AGAUGGGUUXCCXCXC-invdT |
| 249 | 248ex | 481ex | none | XCXCXXUGGGAAAUGUGAGAUGG |
| | | | | GUUXCCXCXC-XCCXACUCCGCG |
| | | | | CGGAGGCUUGAGGUAGCCGUUUX |
| | | | | UCXXC-invdT |
| 250 | 248ex | 481ex | Z | XCXCXXUGGGAAAUGUGAGAUGG |
| | | | | GUUXCCXCXC-XCCXACUCCGCG |
| | | | | CGGAGGCUUGAGGUAGCCGUUUX |
| | | | | UCXXC-invdT |
| 251 | 248ex | 481ex | S18 | XCXCXXUGGGAAAUGUGAGAUGG |
| | | | | GUUXCCXCXC-XCCXACUCCGCG |
| | | | | CGGAGGCUUGAGGUAGCCGUUUX |
| | | | | UCXXC-invdT |
| 252 | 248ex | 481ex | 5U | XCXCXXUGGGAAAUGUGAGAUGG |
| | | | | GUUXCCXCXC-UUUUU-XCCXAC |
| | | | | UCCGCGCGGAGGCUUGAGGUAGC |
| | | | | CGUUUXUCXXC-invdT |
| 253 | 248ex | 481ex | 10U | XCXCXXUGGGAAAUGUGAGAUGG |
| | | | | GUUXCCXCXC-UUUUUUUUUU-X |
| | | | | CCXACUCCGCGCGGAGGCUUGAG |
| | | | | GUAGCCGUUUXUCXXC-invdT |

Where A, C and U are 2′OMe, X is 2′Ome G, G is 2′F G, Z is a 1,3-propanediolspacer, S18 is hexaethyleneglycol and -invdT is an inverted dT residue.
Sequences in bold indicate base pairs added to stabilize a terminal stem and a dash (-) is used to flank the linker.

[0222] Aptamer 628 (SEQ ID NO: 141) is a variant of aptamer 481 in which the U at position 5 relative to the start of aptamer 285 has been replaced with a Z non-nucleotidyl linker. Shown in Table 23 are examples of bispecific aptamers sequences generated using anti-VEGF aptamer, aptamer 628 with an inverted T (SEQ ID NO: 141), and the anti-IL8 aptamer, aptamer 248 with an inverted T (SEQ ID NO: 172) linked with no intervening linker (SEQ ID NO: 254), a non-nucleotide linker comprised of a 3-carbon non-nucleotidyl 1,3-propanediol spacer (Z) (SEQ ID NOS: 255 and 362), a non-nucleotide linker comprised of a hexaethylene glycol spacer (S18) (SEQ ID NOS: 256 and 363), a nucleotide linker comprised of five 2′ OMe deoxyuridine residues (5U) (SEQ ID NO: 257), or a nucleotide linker comprised of ten 2′ OMe deoxyuridine residues (10U) (SEQ ID NO: 258). The order of the aptamer domains is also varied (SEQ ID NOS: 259 and 364; SEQ ID NOS: 260 and 365; SEQ ID NOS: 261 and 366; SEQ ID NOS: 262 and 367; SEQ ID NOS: 263 and -368).

TABLE 23

| SEQ | | | | |
|---|---|---|---|---|
| ID | | | | |
| NO | 5′Apt | 3′Apt | Linker | Sequence |
| 141 | 628 | n/a | n/a | CXAC-Z-CCGCGCGGAGGCUUG |
| | | | | AGGUAGCCGUUUXUCX-invdT |
| 172 | 248 | n/a | n/a | XCXXUGGGAAAUGUGAGAUGGG |
| | | | | UUXCCXC-invdT |
| 254 | 628 | 248 | none | CXAC-Z-CCGCGCGGAGGCUUG |
| | | | | AGGUAGCCGUUUXUCX-XCXXU |
| | | | | GGGAAAUGUGAGAUGGGUUXCC |
| | | | | XC-invdT |
| 255 | 628 | 248 | Z | CXAC-Z-CCGCGCGGAGGCUUG |
| 362 | | | | AGGUAGCCGUUUXUCX-Z-XCX |
| | | | | XUGGGAAAUGUGAGAUGGGUUX |
| | | | | CCXC-invdT |
| 256 | 628 | 248 | S18 | CXAC-Z-CCGCGCGGAGGCUUG |
| 363 | | | | AGGUAGCCGUUUXUCX-S18-X |
| | | | | CXXUGGGAAAUGUGAGAUGGGU |
| | | | | UXCCXC-invdT |
| 257 | 628 | 248 | 5U | CXAC-Z-CCGCGCGGAGGCUUG |
| | | | | AGGUAGCCGUUUXUCX-UUUUU- |
| | | | | XCXXUGGGAAAUGUGAGAUGGG |
| | | | | UUXCCXC-invdT |
| 258 | 628 | 248 | 10U | CXAC-Z-CCGCGCGGAGGCUUG |
| | | | | AGGUAGCCGUUUXUCX-UUUUU |
| | | | | UUUUU-XCXXUGGGAAAUGUGA |
| | | | | GAUGGGUUXCCXC-invdT |
| 259 | 248 | 628 | none | XCXXUGGGAAAUGUGAGAUGGG |
| 364 | | | | UUXCCXC-CXAC-Z-CCGCGCG |
| | | | | GAGGCUUGAGGUAGCCGUUUXU |
| | | | | CX-invdT |
| 260 | 248 | 628 | Z | XCXXUGGGAAAUGUGAGAUGGG |
| 365 | | | | UUXCCXC-Z-CXAC-Z-CCGCG |
| | | | | CGGAGGCUUGAGGUAGCCGUUU |
| | | | | XUCX-invdT |
| 261 | 248 | 628 | S18 | XCXXUGGGAAAUGUGAGAUGGG |
| 366 | | | | UUXCCXC-S18-CXAC-Z-CCG |
| | | | | CGCGGAGGCUUGAGGUAGCCGU |
| | | | | UUXUCX-invdT |
| 262 | 248 | 628 | 5U | XCXXUGGGAAAUGUGAGAUGGG |
| 367 | | | | UUXCCXC-UUUUU-CXAC-Z-C |
| | | | | CGCGCGGAGGCUUGAGGUAGCC |
| | | | | GUUUXUCX-invdT |
| 263 | 248 | 628 | 10U | XCXXUGGGAAAUGUGAGAUGGG |
| 368 | | | | UUXCCXC-UUUUUUUUUU-CXA |
| | | | | C-Z-CCGCGCGGAGGCUUGAGG |
| | | | | UAGCCGUUUXUCX-invdT |

Where A, C and U are 2′OMe, X is 2′Ome G, G is 2′F G, Z is a 1,3-propanediolspacer, S18 is hexaethyleneglycol and -invdT is an inverted dT residue.
Sequences in bold indicate base pairs added to stabilize a terminal stem and a dash (-) is used to flank the linker.

[0223] Shown in Table 24, an extended version of aptamer 628, 628ex with an inverted T (SEQ ID NO: 152) that contains two additional base pairs to stabilize the closing stem is combined with aptamer 248 with an inverted T (SEQ ID NO: 172) using no intervening linker (SEQ ID NO: 264), a non-nucleotide linker comprised of a 3-carbon non-nucleotidyl 1,3-propanediol spacer (Z) (SEQ ID NOS: 265 and 369), a non-nucleotide linker comprised of a hexaethylene glycol spacer (S18) (SEQ ID NOS: 266 and 370), a nucleotide linker comprised of five 2′OMe deoxyuridine residues (5U) (SEQ ID NO: 267), or a nucleotide linker comprised of ten 2′OMe deoxyuridine residues (10U) (SEQ ID NO: 268). The order of the aptamer domains is also varied (SEQ ID NOS: 269 and 371; SEQ ID NOS: 270 and 372; SEQ ID NOS: 271 and 373; SEQ ID NOS: 272 and 374; SEQ ID NOS: 273 and 375).

TABLE 24

| SEQ | | | | |
|---|---|---|---|---|
| ID | | | | |
| NO | 5′Apt | 3′Apt | Linker | Sequence |
| 152 | 628ex | n/a | n/a | CXAC-Z-CCGCGCGGAGGCUUG |
| | | | | AGGUAGCCGUUUXUCX-invdT |
| 172 | 248 | n/a | n/a | XCXXUGGGAAAUGUGAGAUGGG |
| | | | | UUXCCXC-invdT |
| 264 | 628ex | 248 | none | XCCXAC-Z- |
| | | | | CCGCGCGGAGGCUUGAGGUAGC |
| | | | | CGUUUXUCXXC-XCXXUGGGAA |
| | | | | AUGUGAGAUGGGUUXCCXC- |
| | | | | invdT |
| 265 | 628ex | 248 | Z | XCCXAC-Z- |
| 369 | | | | CCGCGCGGAGGCUUGAGGUAGC |
| | | | | CGUUUXUCXXC-Z-XCXXUGGG |
| | | | | AAAUGUGAGAUGGGUUXCCXC- |
| | | | | invdT |
| 266 | 628ex | 248 | S18 | XCCXAC-Z- |
| 370 | | | | CCGCGCGGAGGCUUGAGGUAGC |
| | | | | CGUUUXUCXXC-S18-XCXXUG |
| | | | | GGAAAUGUGAGAUGGGUUXCCX |
| | | | | C-invdT |
| 267 | 628ex | 248 | 5U | XCCXAC-Z- |
| | | | | CCGCGCGGAGGCUUGAGGUAGC |
| | | | | CGUUUXUCXXC-UUUUU-XCXX |
| | | | | UGGGAAAUGUGAGAUGGGUUXC |
| | | | | CXC-invdT |
| 268 | 628ex | 248 | 10U | XCCXAC-Z- |
| | | | | CCGCGCGGAGGCUUGAGGUAGC |
| | | | | CGUUUXUCXXC-UUUUUUUUUU- |
| | | | | XCXXUGGGAAAUGUGAGAUGGG |
| | | | | UUXCCXC-invdT |
| 269 | 248 | 628ex | none | XCXXUGGGAAAUGUGAGAUGGG |
| 371 | | | | UUXCCXC-XCCXAC-Z-CCGCG |
| | | | | CGGAGGCUUGAGGUAGCCGUUU |
| | | | | XUCXXC-invdT |
| 270 | 248 | 628ex | Z | XCXXUGGGAAAUGUGAGAUGGG |
| 372 | | | | UUXCCXC-Z-XCCXAC-Z-CCG |
| | | | | CGCGGAGGCUUGAGGUAGCCGU |
| | | | | UUXUCXXC-invdT |
| 271 | 248 | 628ex | S18 | XCXXUGGGAAAUGUGAGAUGGG |
| 373 | | | | UUXCCXC-S18-XCCXAC-Z-C |
| | | | | CGCGCGGAGGCUUGAGGUAGCC |
| | | | | GUUUXUCXXC-invdT |
| 272 | 248 | 628ex | 5U | XCXXUGGGAAAUGUGAGAUGGG |
| 374 | | | | UUXCCXC-UUUUU-XCCXAC-Z- |
| | | | | CCGCGCGGAGGCUUGAGGUAGC |
| | | | | CGUUUXUCXXC-invdT |
| 273 | 248 | 628ex | 10U | XCXXUGGGAAAUGUGAGAUGGG |
| 375 | | | | UUXCCXC-UUUUUUUUUU-XCC |
| | | | | XAC-Z-CCGCGCGGAGGCUUGA |
| | | | | GGUAGCCGUUUXUCXXC- |
| | | | | invdT |

Where A, C and U are 2′OMe, X is 2′Ome G, G is 2′F G, Z is a 1,3-propanediolspacer, S18 is hexaethyleneglycol and -invdT is an inverted dT residue.
Sequences in bold indicate base pairs added to stabilize a terminal stem and a dash (-) is used to flank the linker.

[0224] Shown in Table 25, the extended version of 248, 248ex with an inverted T (SEQ ID NO: 193) is combined with aptamer 628 with an inverted T (SEQ ID NO: 141) using no intervening linker (SEQ ID NO: 274), a non-nucleotide linker comprised of a 3-carbon non-nucleotidyl 1,3-propanediol spacer (Z) (SEQ ID NOS: 275 and 376), a non-nucleotide linker comprised of a hexaethylene glycol spacer (S18) (SEQ ID NOS: 276 and 377), a nucleotide linker comprised of five 2′OMe deoxyuridine residues (5U) (SEQ ID NO: 277), or a nucleotide linker comprised of ten 2′OMe deoxyuridine residues (10U) (SEQ ID NO: 278). The order of the aptamer domains is also varied (SEQ ID NOS: 279 and 378; SEQ ID NOS: 280 and 379; SEQ ID NOS: 281 and 380; SEQ ID NOS: 282 and 381; SEQ ID NOS: 283 and 382).

TABLE 25

| SEQ | | | | |
|---|---|---|---|---|
| ID | | | | |
| NO | 5′Apt | 3′Apt | Linker | Sequence |
| 141 | 628 | n/a | n/a | CXAC-Z-CCGCGCGGAGGCUUG |
| | | | | AGGUAGCCGUUUXUCX-invdT |
| 193 | 248ex | n/a | n/a | XCXCXXUGGGAAAUGUGAGAUG |
| | | | | GGUUXCCXCXC-invdT |
| 274 | 628 | 248ex | none | CXAC-Z-CCGCGCGGAGGCUUG |
| | | | | AGGUAGCCGUUUXUCX-XCXCX |
| | | | | XUGGGAAAUGUGAGAUGGGUUX |
| | | | | CCXCXC-invdT |
| 275 | 628 | 248ex | Z | CXAC-Z-CCGCGCGGAGGCUUG |
| 376 | | | | AGGUAGCCGUUUXUCX-Z-XCX |
| | | | | CXXUGGGAAAUGUGAGAUGGGU |
| | | | | UXCCXCXC-invdT |
| 276 | 628 | 248ex | S18 | CXAC-Z-CCGCGCGGAGGCUUG |
| 377 | | | | AGGUAGCCGUUUXUCX-S18-X |
| | | | | CXCXXUGGGAAAUGUGAGAUGG |
| | | | | GUUXCCXCXC-invdT |
| 277 | 628 | 248ex | 5U | CXAC-Z-CCGCGCGGAGGCUUG |
| | | | | AGGUAGCCGUUUXUCX-UUUUU- |
| | | | | XCXCXXUGGGAAAUGUGAGAUG |
| | | | | GGUUXCCXCXC-invdT |
| 278 | 628 | 248ex | 10U | CXAC-Z-CCGCGCGGAGGCUUG |
| | | | | AGGUAGCCGUUUXUCX-UUUUU |
| | | | | UUUUU-XCXCXXUGGGAAAUGU |
| | | | | GAGAUGGGUUXCCXCXC- |
| | | | | invdT |
| 279 | 248ex | 628 | none | XCXXUGGGAAAUGUGAGAUGGG |
| 378 | | | | UUXCCXC-CXAC-Z-CCGCGCG |
| | | | | GAGGCUUGAGGUAGCCGUUUXU |
| | | | | CX-invdT |
| 280 | 248ex | 628 | Z | XCXCXXUGGGAAAUGUGAGAUG |
| 379 | | | | GGUUXCCXCXC-Z-CXAC-Z-C |
| | | | | CGCGCGGAGGCUUGAGGUAGCC |
| | | | | GUUUXUCX-invdT |
| 281 | 248ex | 628 | S18 | XCXCXXUGGGAAAUGUGAGAUG |
| 380 | | | | GGUUXCCXCXC-S18-CXAC-Z- |
| | | | | CCGCGCGGAGGCUUGAGGUAGC |
| | | | | CGUUUXUCX-invdT |
| 282 | 248ex | 628 | 5U | XXCXCXACXXUAXAUUAUGGGC |
| 381 | | | | AGUGUGACCXCXCCXC-UUUUU- |
| | | | | CXAC-Z-CCGCGCGGAGGCUUG |
| | | | | AGGUAGCCGUUUXUCX-invdT |
| 283 | 248ex | 628 | 10U | XCXCXXUGGGAAAUGUGAGAUG |
| 382 | | | | GGUUXCCXCXC-UUUUUUUUUU- |
| | | | | CXAC-Z-CCGCGCGGAGGCUUG |
| | | | | AGGUAGCCGUUUXUCX-invdT |

Where A, C and U are 2′OMe, X is 2′Ome G, G is 2′F G, Z is a 1,3-propanediolspacer, S18 is hexaethyleneglycol and -invdT is an inverted dT residue.
Sequences in bold indicate base pairs added to stabilize a terminal stem and a dash (-) is used to flank the linker.

[0225] Shown in Table 26, the extended version of aptamer 628, 628ex with an inverted T (SEQ ID NO: 152) is combined with the extended version of aptamer 248, 248ex with an inverted T (SEQ ID NO: 193) using no intervening linker (SEQ ID NO: 284), a non-nucleotide linker comprised of a 3-carbon non-nucleotidyl 1,3-propanediol spacer (Z) (SEQ ID NOS: 285 and 383), a non-nucleotide linker comprised of a hexaethylene glycol spacer (S18) (SEQ ID NOS: 286 and 384), a nucleotide linker comprised of five 2′OMe deoxyuridine residues (5U) (SEQ ID NO: 287), or a nucleotide linker comprised of ten 2′OMe deoxyuridine residues (10U) (SEQ ID NO: 288). The order of the aptamer domains is also varied (SEQ ID NOS: 289 and 385; SEQ ID NOS: 290 and 386; SEQ ID NOS: 291 and 387; SEQ ID NOS: 292 and 388; SEQ ID NOS: 293 and 389).

TABLE 26

| SEQ | | | | |
|---|---|---|---|---|
| ID | | | | |
| NO | 5′Apt | 3′Apt | Linker | Sequence |
| 152 | 628ex | n/a | n/a | XCCXAC-Z- |
| | | | | CCGCGCGGAGGCUUGAGGUA |
| | | | | GCCGUUUXUCXXC-invdT |
| 193 | 248ex | n/a | n/a | XCXCXXUGGGAAAUGUGAGA |
| | | | | UGGGUUXCCXCXC-invdT |
| 284 | 628ex | 248ex | none | XCCXAC-Z- |
| | | | | CCGCGCGGAGGCUUGAGGUA |
| | | | | GCCGUUUXUCXXC-XCXCXX |
| | | | | UGGGAAAUGUGAGAUGGGUU |
| | | | | XCCXCXC-invdT |
| 285 | 628ex | 248ex | Z | XCCXAC-Z- |
| 383 | | | | CCGCGCGGAGGCUUGAGGUA |
| | | | | GCCGUUUXUCXXC-Z-XCXC |
| | | | | XXUGGGAAAUGUGAGAUGGG |
| | | | | UUXCCXCXC-invdT |
| 286 | 628ex | 248ex | S18 | XCCXAC-Z- |
| 384 | | | | CCGCGCGGAGGCUUGAGGUA |
| | | | | GCCGUUUXUCXXC-S18-XC |
| | | | | XCXXUGGGAAAUGUGAGAUG |
| | | | | GGUUXCCXCXC-invdT |
| 287 | 628ex | 248ex | 5U | XCCXAC-Z- |
| | | | | CCGCGCGGAGGCUUGAGGUA |
| | | | | GCCGUUUXUCXXC-UUUUU- |
| | | | | XCXCXXUGGGAAAUGUGAGA |
| | | | | UGGGUUXCCXCXC-invdT |
| 288 | 628ex | 248ex | 10U | XCCXAC-Z- |
| | | | | CCGCGCGGAGGCUUGAGGUA |
| | | | | GCCGUUUXUCXXC-UUUUUU |
| | | | | UUUU-XCXCXXUGGGAAAUG |
| | | | | UGAGAUGGGUUXCCXCXC- |
| | | | | invdT |
| 289 | 248ex | 628ex | none | XCXCXXUGGGAAAUGUGAGA |
| 385 | | | | UGGGUUXCCXCXC-XCCXAC- |
| | | | | Z-CCGCGCGGAGGCUUGAGG |
| | | | | UAGCCGUUUXUCXXC- |
| | | | | invdT |
| 290 | 248ex | 628ex | Z | XCXCXXUGGGAAAUGUGAGA |
| 386 | | | | UGGGUUXCCXCXC-XCCXAC- |
| | | | | Z-CCGCGCGGAGGCUUGAGG |
| | | | | UAGCCGUUUXUCXXC- |
| | | | | invdT |
| 291 | 248ex | 628ex | S18 | XCXCXXUGGGAAAUGUGAGA |
| 387 | | | | UGGGUUXCCXCXC-XCCXAC- |
| | | | | Z-CCGCGCGGAGGCUUGAGG |
| | | | | UAGCCGUUUXUCXXC- |
| | | | | invdT |
| 292 | 248ex | 628ex | 5U | XCXCXXUGGGAAAUGUGAGA |
| 388 | | | | UGGGUUXCCXCXC-UUUUU- |
| | | | | XCCXAC-Z-CCGCGCGGAGG |
| | | | | CUUGAGGUAGCCGUUUXUCX |
| | | | | XC-invdT |
| 293 | 248ex | 628ex | 10U | XCXCXXUGGGAAAUGUGAGA |
| 389 | | | | UGGGUUXCCXCXC-UUUUUU |
| | | | | UUUU-XCCXAC-Z-CCGCGC |
| | | | | GGAGGCUUGAGGUAGCCGUU |
| | | | | UXUCXXC-invdT |

Where A, C and U are 2′OMe, X is 2′Ome G, G is 2′F G, Z is a 1,3-propanediolspacer, S18 is hexaethyleneglycol and -invdT is an inverted dT residue.
Sequences in bold indicate base pairs added to stabilize a terminal stem and a dash (-) is used to flank the linker.

### III. Target Molecules

[0226] The aptamers and bispecific aptamers disclosed herein are capable of specifically binding one or more target molecules.

[0227] In one embodiment, a bispecific aptamer is disclosed having a first binding moiety and a second binding moiety, wherein the first and second binding moieties bind to different target molecules or antigens. In certain embodiments, the target molecules are proteins and more particularly, selected from the group consisting of VEGF, IL8 and Ang-2.

[0228] A. Vascular Endothelial Growth Factor (VEGF)

[0229] VEGF-A is thought to be the most significant regulator of angiogenesis in the VEGF family. VEGF-A promotes growth of vascular endothelial cells which leads to the formation of capillary-like structures and may be necessary for the survival of newly formed blood vessels. Vascular endothelial cells are thought to be major effectors of VEGF signaling. Retinal pigment epithelial (RPE) cells may also express VEGF receptors and have been shown to proliferate and migrate upon exposure to VEGF. In addition, VEGF is thought to play roles beyond the vascular system. For example, VEGF may play roles in normal physiological functions, including, but not limited to, bone formation, hematopoiesis, wound healing, and development. In various aspects, the bispecific compositions provided herein include aptamers that bind to VEGF-A, thereby inhibiting or reducing angiogenesis, e.g., by inhibiting or preventing growth of vascular endothelial cells, retinal pigment epithelial cells, or both. In certain embodiments, the bispecific compositions provided herein may prevent or reduce binding or association of VEGF-A with a VEGF receptor (e.g., Flt-1, KDR, Nrp-1) expressed on vascular endothelial cells, retinal pigment epithelial cells, or both.

[0230] The VEGF family includes VEGF-A, VEGF-B, VEGF-C, VEGF-D, VEGF-E, VEGF-F, and placental growth factor (PlGF). The aptamers within the bispecific aptamers disclosed herein primarily bind to variants and isoforms of VEGF-A. In certain embodiments, such aptamers may also bind to one or more of VEGF-B, VEGF-C, VEGF-D, VEGF-E, VEGF-F, and PlGF. Transcription of VEGF mRNA may be upregulated under hypoxic conditions. Furthermore, various growth factors and cytokines have been shown to upregulate VEGF mRNA expression, including, without limitation, epidermal growth factor (EGF), transforming growth factor-alpha (TGF-α), transforming growth factor-beta (TGF-β), keratinocyte growth factor (KGF), insulin-like growth factor-1 (IGF-1), fibroblast growth factor (FGF), platelet-derived growth factor (PDGF), interleukin 1-alpha (IL-1-α), interleukin-6 (IL-6), and interleukin-8 (IL8). VEGF-A is thought to play a role in various ocular diseases and disorders such as, but not limited to, diabetic retinopathy (DR), retinopathy of prematurity (ROP), retinal vein occlusion (RVO), branch retinal vein occlusion (BRVO), central retinal vein occlusion (CRVO), choroidal neovascularization (CNV), diabetic macular edema (DME), macular edema, neovascular (or wet) age-related macular degeneration (nAMD or wAMD), myopic choroidal neovascularization, polypoidal choroidal vasculopathy (PCV), punctate inner choroidopathy, presumed ocular histoplasmosis syndrome, familial exudative vitreoretinopathy, and retinoblastoma.

[0231] In certain embodiments, the bispecific compositions provided herein may be used to treat an ocular disease or disorder involving one or more factors that upregulate VEGF-A expression and/or activity, including, but not limited to, hypoxic conditions; a growth factor such as EGF, TGF-α, TGF-β, KGF, IGF-1, FGF, or PDGF; and a cytokine such as IL-1-α, IL6, and IL8. In certain embodiments, the bispecific compositions provided herein may be used to treat an ocular disease or disorder selected from the group consisting of: diabetic retinopathy (DR), retinopathy of prematurity (ROP), retinal vein occlusion (RVO), branch retinal vein occlusion (BRVO), central retinal vein occlusion (CRVO), choroidal neovascularization (CNV), diabetic macular edema (DME), macular edema, neovascular (or wet) age-related macular degeneration (nAMD or wAMD), myopic choroidal neovascularization, polypoidal choroidal vasculopathy (PCV), punctate inner choroidopathy, presumed ocular histoplasmosis syndrome, familial exudative vitreoretinopathy, radiation retinopathy and retinoblastoma. The gene for human VEGF-A contains eight exons and encodes at least 16 isoforms. The most common isoforms generated by alternative splicing mechanisms are VEGF-A₁₂₁, VEGF-A₁₆₅, VEGF-A₁₈₉, and VEGF-A₂₀₆. Of these, VEGF-A₁₆₅, VEGF-A₁₈₉, and VEGF-A₂₀₆ each contain a C-terminal heparin binding domain (HBD). In contrast, VEGF-A₁₂₁ lacks a heparin-binding domain. Furthermore, plasmin activation may result in proteolytic cleavage of VEGF-A₁₆₅, VEGF-A₁₈₉, and VEGF-A₂₀₆, resulting in the release of the soluble VEGF-A₁₁₀ variant, which also lacks a heparin-binding domain. In various aspects, the bispecific compositions provided herein may be comprised of at least one aptamer or aptamer domain that binds to and inhibits a function associated with one or more VEGF-A isoforms or variants. For example, the aptamers provided herein may bind to and inhibit a function associated with one or more of VEGF-A₁₁₀, VEGF-A₁₂₁, VEGF-A₁₆₅, VEGF-A₁₈₉, and VEGF-A₂₀₆. In certain embodiments, the bispecific compositions provided herein may be comprised of at least one aptamer or aptamer domain that are pan-variant specific aptamers. In certain embodiments, a pan-variant specific aptamer or aptamer domain is disclosed that binds to each of VEGF-Allo, VEGF-A₁₂₁, VEGF-A₁₆₅, VEGF-A₁₈₉, and VEGF-A₂₀₆. In certain embodiments, the bispecific compositions provided herein may be comprised of at least one aptamer or aptamer domain that binds to a structural feature that is common to each of VEGF-Allo, VEGF-A₁₂₁, VEGF-A₁₆₅, VEGF-A₁₈₉, and VEGF-A₂₀₆. For example, the aptamers provided herein may bind to the receptor binding face, or a portion thereof, of each of VEGF-Allo, VEGF-A₁₂₁, VEGF-A₁₆₅, VEGF-A₁₈₉, and VEGF-A₂₀₆. In certain embodiments, the bispecific aptamers provided herein may be comprised of at least one aptamer or aptamer domain that binds to the receptor binding domain, or a portion thereof, of each of VEGF-Allo, VEGF-A₁₂₁, VEGF-A₁₆₅, VEGF-A₁₈₉, and VEGF-A₂₀₆. certain embodiments. In certain embodiments, the bispecific compositions provided herein may be comprised of at least one aptamer or aptamer domain that binds to a structural feature of VEGF-A other than the heparin binding domain found in VEGF-A₁₆₅, VEGF-A₁₈₉, and VEGF-A₂₀₆.

[0232] VEGF-A is known to interact with the receptor tyrosine kinases VEGFR1 (also known as Flt-1), VEGFR2 (also known as KDR or Flk-1), and Neuropilin-1 (Nrp-1). Nrp-1 is thought to be a co-receptor for KDR. VEGF receptors have been shown to be expressed by endothelial cells, macrophages, hematopoietic cells, and smooth muscle cells. KDR is a class IV receptor tyrosine kinase that binds 2:1 to VEGF-A dimers. Flt-1 is a receptor tyrosine kinase that binds to VEGF-A with a 3-10-fold higher affinity than KDR, and has also been shown to bind to VEGF-B and PlGF. Flt-1 expression may be upregulated by hypoxia, and its affinity for VEGF-A has been proposed as a negative regulator of signaling by KDR by acting as a decoy receptor. An alternative splicing variant of Flt-1 results in a soluble variant of the receptor (sFlt-1) which has been suggested to act as an anti-angiogenic sink for VEGF-A. Association of VEGF-A₁₆₅ with KDR may be enhanced by the interaction of the heparin binding domain with co-receptor Nrp-1, which may enhance downstream signaling of KDR. Nrp-1 also has strong affinity for Flt-1, which may prevent Nrp-1 association with VEGF-A₁₆₅ and may be a secondary regulatory mechanism for VEGF-A induced angiogenesis.

[0233] In certain embodiments, bispecific compositions provided herein may be comprised of at least one aptamer or aptamer domain that binds to one or more isoforms or variants of VEGF-A, and may prevent or reduce binding or association of VEGF-A with a VEGF receptor. For example, bispecific compositions provided herein may prevent or reduce binding of one or more isoforms or variants of VEGF-A with Flt-1, KDR, Nrp-1, or any combination thereof. In certain embodiments, bispecific aptamers provided herein may be comprised of at least one aptamer or aptamer domain that may prevent or reduce binding of one or more of VEGF-A₁₁₀, VEGF-A₁₂₁, VEGF-A₁₆₅, VEGF-A₁₈₉, and VEGF-A₂₀₆ to one or more of Flt-1, KDR, and Nrp-1. In a particular embodiment, bispecific compositions provided herein may be comprised of at least one aptamer or aptamer domain that prevents or reduces binding of one or more isoforms or variants of VEGF-A to KDR. In certain embodiments, the bispecific composition may be comprised of at least one aptamer or aptamer domain that are pan-variant specific aptamers that bind to each of VEGF-A₁₁₀, VEGF-A₁₂₁, VEGF-A₁₆₅, VEGF-A₁₈₉, and VEGF-A₂₀₆, and reduce or prevent binding or association thereof with one or more of Flt-1, KDR, and Nrp-1.

[0234] In one embodiment, an amino acid sequence of human VEGF-A₂₀₆ may comprise the following sequence:

(SEQ ID NO: 294)
APMAEGGGQNHHEVVKFMDVYQRSYCHPIETLVDIFQEYPDEIEYIFK
PSCVPLMRCGGCCNDEGLECVPTEESNITMQIMRIKPHQGQHIGEMSF
LQHNKCECRPKKDRARQEKKSVRGKGKGQKRKRKKSRYKSWSVYVGAR
CCLMPWSLPGPHPCGPCSERRKHLFVQDPQTCKCSCKNTDSRCKARQL
ELNERTCRCDKPRR.

[0235] In one embodiment, an amino acid sequence of human VEGF-A₁₈₉ may comprise the following sequence:

(SEQ ID NO: 295)
APMAEGGGQNHHEVVKFMDVYQRSYCHPIETLVDIFQEYPDEIEYIFK
PSCVPLMRCGGCCNDEGLECVPTEESNITMQIMRIKPHQGQHIGEMSF
LQHNKCECRPKKDRARQEKKSVRGKGKGQKRKRKKSRYKSWSVPCGPC
SERRKHLFVQDPQTCKCSCKNTDSRCKARQLELNERTCRCDKPRR

[0236] In one embodiment, an amino acid sequence of human VEGF-A₁₆₅ may comprise the following sequence:

(SEQ ID NO: 296)
APMAEGGGQNHHEVVKFMDVYQRSYCHPIETLVDIFQEYPDEIEYIFK
PSCVPLMRCGGCCNDEGLECVPTEESNITMQIMRIKPHQGQHIGEMSF
LQHNKCECRPKKDRARQENPCGPCSERRKHLFVQDPQTCKCSCKNTDS
RCKARQLELNERTCRCDKPRR.

[0237] In one embodiment, an amino acid sequence of human VEGF-A₁₂₁ may comprise the following sequence:

(SEQ ID NO: 297)
APMAEGGGQNHHEVVKFMDVYQRSYCHPIETLVDIFQEYPDEIEYIFK
PSCVPLMRCGGCCNDEGLECVPTEESNITMQIMRIKPHQGQHIGEMSF
LQHNKCECRPKKDRARQEKCDKPRR

[0238] In one embodiment, an amino acid sequence of human VEGF-Allo may comprise the following sequence:

(SEQ ID NO: 298)
APMAEGGGQNHHEVVKFMDVYQRSYCHPIETLVDIFQEYPDEIEYIFK
PSCVPLMRCGGCCNDEGLECVPTEESNITMQIMRIKPHQGQHIGEMSF
LQHNKCECRPKKDR.

[0239] Where the aptamer, bispecific aptamer or composition disclosed herein inhibits the function of VEGF, the inhibition may be complete or partial. In certain embodiments, the inhibition is at least 5%, at least 10%, at least 15%, at least 20%, at least 25%, at least 30%, at least 35%, at least 40%, at least 45%, at least 50%, at least 55%, at least 60%, at least 65%, at least 70%, at least 75%, at least 80%, at least 85% at least 90%, at least 95% or at least 100%.

[0240] B. Interleukin-8 (IL8)

[0241] Interleukin-8 (IL8; also known as chemokine (C—X—C motif) ligand 8 (CXCL8)), is a chemokine that may be involved in acute and chronic inflammation as well as various human malignancies. IL8 may function by being secreted into the extracellular space and by binding to membrane-bound receptors; as such, the compositions and methods of the disclosure may prevent or reduce binding of IL8 to such membrane-bound receptors. IL8 may be secreted by a number of different cell types, including, but not limited to, monocytes, macrophages, neutrophils, epithelial cells, endothelial cells, tumors cells, melanocytes, and hepatocytes. In the eye, IL8 may be secreted by, for example, retinal pigment epithelial cells, Müller cells, corneal epithelial cells, corneal fibroblasts, conjunctival epithelial cells, and uveal melanocytes. IL8 is upregulated in response tissue damage and a number of other stimuli including hypoxia and oxidative stress, advanced glycation end products, high glucose and complement. IL8 and its receptors may also be upregulated in a surgically induced model of proliferative vitreoretinopathy (PVR). Accordingly, the bispecific aptamer compositions comprised of at least one aptamer or aptamer domain of the disclosure may bind to IL8 after it has been secreted by various cell types.

[0242] IL8 is a member of the CXC family of chemokines and may be closely related to GRO-α (also known as CXCL1) and GRO-β (also known as CXCL2). In certain embodiments, the bispecific aptamers are comprised of at least one aptamer or aptamer domain that selectively binds to IL8. In certain embodiments, the aptamers may have little to no binding affinity for GRO-α, GRO-β, or both. In other cases, such anti-IL8 aptamers may also bind to GRO-α, GRO-β, or both. IL8 may signal through both the C—X—C motif chemokine receptor 1 (CXCR1) and the C—X—C motif chemokine receptor 2 (CXCR2); as such, the compositions and methods disclosed herein may prevent or reduce the ability of IL8 to signal through CXCR1, CXCR2, or both. There are thought to be two major isoforms of IL8: IL8₇₂ and IL8₇₇, IL8₇₇ may have a decreased affinity for receptor binding. In certain embodiments, the compositions of bispecific aptamers comprised of at least one aptamer or aptamer domain of the disclosure may include anti-IL8 aptamers that bind to an isoform of IL8. For example, the compositions may include anti-IL8 aptamers that bind to IL8₇₂. Additionally, or alternatively, the compositions may include anti-IL8 aptamers that bind to IL8₇₇. Additionally, or alternatively, the compositions may include anti-IL8 aptamers that bind to both IL8₇₂ and IL8₇₇. In addition, IL8 may exist as both a monomer and dimer, both of which may bind to CXCR1, CXCR2, or both. In certain embodiments, the bispecific compositions may include anti-IL8 aptamers that bind to a monomer of IL8. In certain embodiments, the bispecific compositions may include anti-IL8 aptamers that bind to a dimer of IL8.

[0243] CXCR1 and CXCR2 are seven-transmembrane-domain containing G-coupled protein receptors (GPCRs) which may signal through intracellular G-proteins. G protein subunits may be released into the cells leading to an increase in intracellular cAMP or phospholipase that may activate MAPK signaling. IL8 binding may cause an increase in 3,4,5-inosital triphosphate which may lead to a rapid increase in free calcium and subsequently to neutrophil degranulation. Neutrophil degranulation may be an important step in the infiltration process that may allow for bacterial clearance. Glycosaminoglycans (GAGs), in particular heparin, may bind to the C-terminus of IL8; such binding is thought to increase the activity of IL8 by allowing for binding to the surface of neutrophils. In certain embodiments, the anti-IL8 compositions of the disclosure may prevent or reduce binding of IL8 to GAGs (e.g., heparin). In certain embodiments, the anti-IL8 compositions may prevent or reduce binding of IL8 to the surface of neutrophils. In addition to the role of IL8 in neutrophil migration, IL8 may affect neovascularization and angiogenesis, thus, anti-IL8 compositions of the disclosure may affect neovascularization, angiogenesis, or both. In this regard, in addition to its interactions with CXCR1 and CXCR2, IL8 has also been reported to interact with the VEGF receptor, VEGFR2, leading to receptor phosphorylation, pathway activation. In certain embodiments, the compositions described herein may affect a signaling pathway associated with IL8 signaling through CXCR1, CXCR2 or VEGFR2. In certain embodiments, the compositions described herein may affect a signaling pathway associated with IL8 signaling through CXCR1, CXCR2 or both. In certain embodiments, the compositions described herein may affect a signaling pathway associated with IL8 signaling through CXCR1, VEGFR2 or both. In certain embodiments, the bispecific compositions described herein may affect a signaling pathway associated with IL8 signaling through CXCR2, VEGFR2 or both. For example, bispecific aptamers of the disclosure may be comprised of at least one aptamer or aptamer domain that may prevent or reduce IL8-induced G protein signaling; without wishing to be bound by theory, such aptamers may prevent an increase in intracellular cAMP or phospholipase, thereby preventing or reducing IL8-induced MAPK signaling. In some examples, the bispecific compositions of the disclosure may prevent or reduce IL8-induced increases in 3,4,5-inositol triphosphate and increases in intracellular free calcium. In certain embodiments, the bispecific compositions of the disclosure may prevent or reduce IL8-induced neutrophil degranulation.

[0244] In one embodiment, an amino acid sequence of human IL8₇₈ comprises the following sequence:

(SEQ ID NO: 299)
AVLPRSAKELRCQCIKTYSKPFHPKFIKELRVIESGPHCANTEIIVKL
SDGRELCLDPKENWVQRVVEKFLKRAENS.

[0245] In one embodiment, an amino acid sequence of human IL8₇₂ may comprise the following sequence:

(SEQ ID NO: 300)
SAKELRCQCIKTYSKPFHPKFIKELRVIESGPHCANTEIIVKLSDGRE
LCLDPKENWVQRVVEKFLKRAENS

[0246] Where the aptamer, bispecific aptamer or composition disclosed herein inhibits the function of IL8 the inhibition may be complete or partial. In certain embodiments, the inhibition is at least 5%, at least 10%, at least 15%, at least 20%, at least 25%, at least 30%, at least 35%, at least 40%, at least 45%, at least 50%, at least 55%, at least 60%, at least 65%, at least 70%, at least 75%, at least 80%, at least 85%, at least 90%, at least 95% or at least 100%.

[0247] C. Angiopoietins (Ang2)

[0248] In addition to the VEGF family, the angiopoietins are thought to be involved in vascular development and angiogenesis. In particular angiopoietin 2, (Ang2) may be important for the development and maintenance of the three mammalian vascular systems; as such, the compositions and methods provided herein may impact the development and maintenance of the vasculature. In preferred embodiments, the methods and compositions provided herein target angiogenesis, and generally may have anti-angiogenic properties.

[0249] Ang2 is one of four members of the angiopoietin family of secreted glycoproteins. Additional members of this family include angiopoietin-1 (Ang1), angiopoietin-3 (Ang3) and angiopoietin-4 (Ang4). Ang1 is likely an agonist of the receptor tyrosine kinase (RTK) with Ig and epidermal growth factor homology domains receptor, Tie2. Ang2 is a vertebrate receptor tyrosine kinase antagonist that may also act as a Tie 2 agonist under certain context-specific conditions. Ang2 likely inhibits Ang1-mediated Tie2 phosphorylation by competing for the same receptor-binding site on Tie2.

[0250] Sequence homology between Human Ang1 and Ang2 is roughly 64%. Structurally, the angiopoietins are very similar, sharing a notable N-terminal signal peptide (Met1-Thr15 for Ang1 and Met1-Ala18 for Ang2) and super-clustering coiled-coil motif (Phe78-Leu261 for Ang1 and Asp75-Gln248 for Ang2), and a C-terminal fibrinogen-like binding domain, including the receptor binding domain of Ang2 (Arg277-Phe498 for Ang1; Lys275-Phe496 for Ang2). The anti-Ang2 compositions provided herein may be designed to bind specifically to Ang2, and may generally demonstrate little to no binding of Ang1, Ang3, or Ang4.

[0251] Disclosed herein are bispecific aptamers comprised of at least one aptamer or aptamer domain that binds to and antagonize a function associated with Ang2. Generally, the aptamers described herein may be designed to bind to a specific region of Ang2, and the mechanism of inhibition of Ang2 function may vary according to where the aptamer binds.

[0252] In one embodiment, the bispecific composition is comprised of at least one aptamer or aptamer domain that binds to the receptor binding domain or fibrinogen-like binding domain of Ang2. The C-terminal domain (including the fibrinogen-like binding domain) of Ang2 may be responsible for binding the immunoglobulin (Ig)-like domain of Tie2. Accordingly, bispecific compositions comprised of at least one aptamer or aptamer domain that targets the receptor binding domain or fibrinogen-like binding domain of Ang2 may prevent or reduce binding of Ang2 to Tie2.

[0253] In one embodiment, the bispecific composition is comprised of at least one aptamer or aptamer domain that bind to the coiled-coil motif of Ang2. Without wishing to be bound by theory, the coiled-coil motif may be important for mediating the homo- and heterodimerization of the angiopoietins. In certain embodiments, homo- and heterodimerization of the angiopoietins may be important for influencing the activity of Tie2 and the downstream signaling processes that it controls. In certain embodiments, Ang2 may be found as tetramers, hexamers and higher-order oligomers in solution. Thus, in certain embodiments, the bispecific compositions may bind to the coiled-coil motif of Ang2. In certain embodiments, such bispecific compositions may prevent homo- and/or heterodimerization of Ang2. In certain embodiments, such bispecific compositions may prevent or reduce formation of tetramers hexamers, or higher-order oligomers of Ang2.

[0254] In certain embodiments, a bispecific composition is disclosed comprised of at least one aptamer or aptamer domain that bind to regions of Ang2 that are involved in binding to specific cell-surface co-receptors. Endothelial cells may contain unique Tie2 binding co-receptors such as the Tie2 homolog, Tie1, or integrins, which may provide a means to discriminate the angiopoietins from each other. Although Tie2 may be the primary receptor of the angiopoietins, integrins such as the avβ3, avβ5 and a5β1 integrins may also be capable of binding to Ang2, albeit with low affinity, and may play a role in regulating the activities of these proteins in both a Tie2-dependent and Tie2-independent manner. Thus, although the dominant cellular responses to Ang2 may result from direct interactions with Tie2, they may also involve the interactions of co-receptors. Alternatively, cellular responses to Ang2 may occur through direct interactions with the integrins themselves. Hence, in certain embodiments, the bispecific compositions provided herein may bind to regions of Ang2 that prevent binding of Ang2 with Tie1, avβ3 integrin, avβ5 integrin, and/or a5β1 integrin.

[0255] In one embodiment, an amino acid sequence of human Ang2 comprises the following sequence:

(SEQ ID NO: 301)
YNNFRKSMDSIGKKQYQVQHGSCSYTFLLPEMDNCRSSSSPYVSNAVQ
RDAPLEYDDSVQRLQVLENIMENNTQWLMKLENYIQDNMKKEMVEIQQ
NAVQNQTAVMIEIGTNLLNQTAEQTRKLTDVEAQVLNQTTRLELQLLE
HSLSTNKLEKQILDQTSEINKLQDKNSFLEKKVLAMEDKHIIQLQSIK
EEKDQLQVLVSKQNSIIEELEKKIVTATVNNSVLQKQQHDLMETVNNL
LTMMSTSNSAKDPTVAKEEQISFRDCAEVFKSGHTTNGIYTLTFPNST
EEIKAYCDMEAGGGGWTIIQRREDGSVDFQRTWKEYKVGFGNPSGEYW
LGNEFVSQLTNQQRYVLKIHLKDWEGNEAYSLYEHFYLSSEELNYRIH
LKGLTGTAGKISSISQPGNDFSTKDGDNDKCICKCSQMLTGGWWFDAC
GPSNLNGMYYPQRQNTNKFNGIKWYYWKGSGYSLKATTMMIRPADF.

[0256] Where the aptamer, bispecific aptamer or composition disclosed herein inhibits the function of Ang2 the inhibition may be complete or partial. In certain embodiments, the inhibition is at least 5%, at least 10%, at least 15%, at least 20%, at least 25%, at least 30%, at least 35%, at least 40%, at least 45%, at least 50%, at least 55%, at least 60%, at least 65%, at least 70%, at least 75%, at least 80%, at least 85%, at least 90%, at least 95% or at least 100%.

### IV. Methods of Use

[0257] Disclosed herein are methods for the treatment of ocular diseases or disorders utilizing the aptamers, bispecific aptamers or compositions disclosed herein.

[0258] Generally, the methods disclosed herein involve administration of the bispecific aptamer to a subject in need thereof and in particular, methods of treatment involve administration of the bispecific aptamer or a pharmaceutical composition comprising the same to a subject in need thereof.

[0259] The subject may have been previously diagnosed with an ocular disorder (e.g., a retinal disease or disorder) or may be at risk for developing an ocular disease or disorder (e.g., a retinal disease or disorder) due to one or more factors, for example, age, obesity, diabetes, smoking, eye trauma or family history.

[0260] In certain embodiments, the methods include the use of a bispecific aptamer comprised of an anti-VEGF aptamer domain linked to an anti-IL8 aptamer domain for, e.g., the treatment of ocular diseases or disorders. In certain embodiments, the methods include the use of a bispecific aptamer comprised of a pan specific anti-VEGF aptamer domain linked to an anti-IL8 aptamer domain. In certain embodiments, the ocular disease or disorder may be age-related macular degeneration. In a particular embodiment, macular degeneration may be the wet form of age-related macular degeneration (wAMD). In a particular embodiment, macular degeneration may be the dry form of age-related macular degeneration (dAMD). In certain embodiments, the ocular disease or disorder may be proliferative diabetic retinopathy. In certain embodiments, the ocular disease or disorder may be diabetic retinopathy. In certain embodiments, the ocular disease or disorder may be diabetic macular edema. In certain embodiments, the ocular disease or disorder may be nonarteritic anterior ischemic optic neuropathy. In certain embodiments, the ocular disease or disorder may be uveitis. Uveitis can be, for example, infectious uveitis or non-infectious uveitis. Uveitis can be, for example, Iritis (anterior uveitis); Cyclitis (intermediate uveitis); Choroiditis and retinitis (posterior uveitis); and/or Diffuse uveitis (panuveitis). In certain embodiments, the ocular disease or disorder may be Behcet's disease. In certain embodiments, the ocular disease or disorder may be Coats' disease. In certain embodiments, the ocular disease or disorder may be retinopathy of prematurity. In certain embodiment, the ocular disease or disorder may be dry eye. In certain embodiments, the ocular disease or disorder may be allergic conjunctivitis. In certain embodiments, the ocular disease or disorder may be pterygium. In certain embodiments, the ocular disease or disorder may be branch retinal vein occlusion. In certain embodiments, the ocular disease or disorder may be central retinal vein occlusion. In certain embodiments, the ocular disease or disorder may be adenovirus keratitis. In certain embodiments, the ocular disease or disorder may be corneal ulcers. In certain embodiments, the ocular disease or disorder may be vernal keratoconjunctivitis. In certain embodiments, the ocular disease or disorder may be Stevens-Johnson syndrome. In certain embodiments, the ocular disease or disorder may be corneal herpetic keratitis. In certain embodiments, the ocular disease or disorder may be rhegmatogenous retinal detachment. In certain embodiments, the ocular disease or disorder may be pseudo-exfoliation syndrome. In certain embodiments, the ocular disease or disorder may be proliferative vitreoretinopathy. In certain embodiments, the ocular disease or disorder may be infectious conjunctivitis. In certain embodiments, the ocular disease or disorder may be geographic atrophy. In certain embodiments, the ocular disease or disorder may be Stargardt disease. In certain embodiments, the ocular disease or disorder may be retinitis pigmentosa. In certain embodiments, the ocular disease or disorder may be Contact Lens-Induced Acute Red Eye (CLARE). In certain embodiments, ocular disease or disorder may be conjunctivochalasis. In certain embodiments, the ocular disease or disorder may be an inherited retinal disease. In certain embodiments, the ocular disease or disorder may be a retinal degenerative disease. In certain embodiments, a subject having an ocular disease or disorder may exhibit elevated levels of VEGF. In certain embodiments, a subject having an ocular disease or disorder may exhibit elevated levels of IL8. In certain embodiments, a subject having an ocular disease or disorder may exhibit elevated levels of VEGF and IL8. In certain embodiments, a subject having an ocular disease or disorder may exhibit elevated bisretinoids such as, for example, N-retinylidene-N-retinylethanolamine (A2E). In certain embodiments, the methods may include the use of a bispecific aptamer comprised of a pan specific anti-VEGF aptamer domain linked to an anti-IL8 aptamer domain for the treatment of any of the aforementioned diseases that do not respond or show in complete response to anti-VEGF treatment alone (e.g., VEGF non-responders).

[0261] In certain embodiment, the methods may involve the inhibition of a function associated with IL8. In certain embodiments, the methods involve preventing or reducing IL8 binding to CXCR1, CXCR2, or both. In certain embodiments, the methods may involve preventing or reducing IL8 binding to CXCR1, CXCR2, VEGFR2 or any combination thereof. In certain embodiments, the methods may involve preventing or reducing downstream signaling associated with CXCR1, CXCR2, or both. In certain embodiments, the methods may involve preventing or reducing downstream signaling associated with CXCR1, CXCR2, VEGFR2 or any combination thereof. In certain embodiments, the methods may involve the inhibition of a function associated with IL8 for the treatment of ocular diseases or disorders. In some aspects of the disclosure, the methods may involve partial or complete inhibition of a function associated with IL8. In certain embodiments, the methods may involve partial or complete inhibition of a function associated with IL8 for the treatment of ocular diseases. Additionally, or alternatively, the methods may involve partial or complete inhibition of a function associated with IL8, in combination with partial or complete inhibition of a function associated with VEGF, for the treatment of an ocular disease or disorder. In certain embodiments, the methods may involve the inhibition of a function associated with IL8 for the treatment of wet age-related macular degeneration. In certain embodiments, the methods may involve the inhibition of a function associated with IL8 for the treatment of dry age-related macular degeneration. In certain embodiments, the methods may involve the inhibition of a function associated with IL8 for the treatment of geographic atrophy. In certain embodiments, the methods may involve the inhibition of a function associated with IL8 for the treatment of proliferative diabetic retinopathy. In certain embodiments, the methods may involve the inhibition of a function associated with IL8 for the treatment of retinal vein occlusion. In certain embodiments, the method may involve the inhibition of a function associated with IL8 for the treatment of central retinal vein occlusion. In certain embodiments, the methods may involve the inhibition of a function associated with IL8 for the treatment of diabetic retinopathy. In certain embodiments, the methods may involve the inhibition of a function associated with IL8 for the treatment of diabetic macular edema. In certain embodiments, the methods may involve the inhibition of a function associated with IL8 for the treatment of nonarteritic anterior ischemic optic neuropathy. In certain embodiments, the methods may involve the inhibition of a function associated with IL8 for the treatment of uveitis. Uveitis can be, for example, infectious uveitis or non-infectious uveitis. Uveitis can be, for example, Iritis (anterior uveitis); Cyclitis (intermediate uveitis); Choroiditis and retinitis (posterior uveitis); and/or Diffuse uveitis (panuveitis). In certain embodiments, the methods may involve the inhibition of a function associated with IL8 for the treatment of Behcet's disease. In certain embodiments, the methods may involve the inhibition of a function associated with IL8 for the treatment of Coats' disease. In certain embodiments, the methods may involve the inhibition of a function associated with IL8 for the treatment of retinopathy of prematurity. In certain embodiments, the methods may involve the inhibition of a function associated with IL8 for the treatment of dry eye. In certain embodiments, the methods and s may involve the inhibition of a function associated with IL8 for the treatment of allergic conjunctivitis. In certain embodiments, the methods may involve the inhibition of a function associated with IL8 for the treatment of pterygium. In certain embodiments, the methods may involve the inhibition of a function associated with IL8 for the treatment of branch retinal vein occlusion. In certain embodiments, the methods may involve the inhibition of a function associated with IL8 for the treatment of central retinal vein occlusion. In certain embodiments, the methods may involve the inhibition of a function associated with IL8 for the treatment of adenovirus keratitis. In certain embodiments, the methods may involve the inhibition of a function associated with IL8 for the treatment of corneal ulcers. In certain embodiments, the methods may involve the inhibition of a function associated with IL8 for the treatment of vernal keratoconjunctivitis. In certain embodiments, the methods may involve the inhibition of a function associated with IL8 for the treatment of Stevens-Johnson syndrome. In certain embodiments, the methods may involve the inhibition of a function associated with IL8 for the treatment of corneal herpetic keratitis. In certain embodiments, the methods may involve the inhibition of a function associated with IL8 for the treatment of rhegmatogenous retinal detachment. In certain embodiments, the methods may involve the inhibition of a function associated with IL8 for the treatment of pseudo-exfoliation syndrome. In certain embodiments, the methods may involve the inhibition of a function associated with IL8 for the treatment of proliferative vitreoretinopathy. In certain embodiments, the methods and compositions the inhibition of a function associated with IL8 for the treatment of infectious conjunctivitis. In certain embodiments, the methods may involve the inhibition of a function associated with IL8 for the treatment of Stargardt disease. In certain embodiments, the methods may involve the inhibition of a function associated with IL8 for the treatment of retinitis pigmentosa. In certain embodiments, the methods may involve the inhibition of a function associated with IL8 for the treatment of Contact Lens-Induced Acute Red Eye (CLARE). In certain embodiments, the methods may involve the inhibition of a function associated with IL8 for the treatment of symptoms associated with conjunctivochalasis. In certain embodiments, the methods may involve the inhibition of a function associated with IL8 for the treatment of an inherited retinal disease. In certain embodiments, the methods and may involve the inhibition of a function associated with IL8 for the treatment of a retinal degenerative disease. In certain embodiments, the methods may involve the inhibition of a function associated with IL8 for the treatment of an ocular disease or disorder exhibiting elevated levels of IL8. In certain embodiments, the methods may involve the inhibition of a function associated with IL8 for the treatment an ocular disease or disorder exhibiting elevated levels of bisretinoids, such as, for example, N-retinylidene-N-retinylethanoloamine (A2E).

[0262] In certain embodiments, the methods may involve the inhibition of a function associated with VEGF-A. In certain embodiments, the methods may involve preventing or reducing VEGF-A binding to or interaction with one or more VEGF receptors. For example, the methods may involve preventing or reducing VEGF-A binding to or interaction with Flt-1, KDR, Nrp-1, or any combination thereof. In certain embodiments, the methods and may involve preventing or reducing downstream signaling associated with Flt-1, KDR, Nrp-1, or any combination thereof. In certain embodiments, the methods may involve the inhibition of a function associated with VEGF-A for the treatment of ocular diseases or disorders. In certain embodiments, the methods may involve the inhibition of a function associated with VEGF-A for the treatment of diabetic retinopathy. In certain embodiments, the methods may involve the inhibition of a function associated with VEGF-A for the treatment of retinopathy of prematurity. In certain embodiments, the methods and compositions may involve the inhibition of a function associated with VEGF-A for the treatment of central retinal vein occlusion. In certain embodiments, the methods may involve the inhibition of a function associated with VEGF-A for the treatment of macular edema. In certain embodiments, the methods may involve the inhibition of a function associated with VEGF-A for the treatment of choroidal neovascularization. In certain embodiments, the methods and may involve the inhibition of a function associated with VEGF-A for the treatment of neovascular (or wet) age-related macular degeneration. In certain embodiments, the methods may involve the inhibition of a function associated with VEGF-A for the treatment of myopic choroidal neovascularization. In certain embodiments, the methods and compositions may involve the inhibition of a function associated with VEGF-A for the treatment of punctate inner choroidopathy. In certain embodiments, the methods and compositions may involve the inhibition of a function associated with VEGF-A for the treatment of presumed ocular histoplasmosis syndrome. In certain embodiments, the methods may involve the inhibition of a function associated with VEGF-A for the treatment of familial exudative vitreoretinopathy. In certain embodiments, the methods may involve the inhibition of a function associated with VEGF-A for the treatment of retinoblastoma. In certain embodiments, the methods may involve the inhibition of a function associated with VEGF-A for the treatment of an ocular disease or disorder exhibiting elevated levels of one or more isoforms or variants of VEGF-A.

[0263] Additionally or alternatively, the methods may involve the inhibition of a function associated with IL8, in combination with inhibition of a function associated with VEGF, for the treatment of any one of the following: wet age-related macular degeneration, dry age-related macular degeneration, geographic atrophy, proliferative diabetic retinopathy, retinal vein occlusion, central retinal vein occlusion, diabetic retinopathy, diabetic macular edema, central serous chorioretinopathy, X-linked retinitis pigmentosa, X-linked retinoschisis, nonarteritic anterior ischemic optic neuropathy, uveitis (including infectious uveitis, non-infectious uveitis, iritis (anterior uveitis), cyclitis (intermediate uveitis), choroiditis and retinitis (posterior uveitis), diffuse uveitis (panuveitis)), scleritis, optic neuritis, optic neuritis secondary to multiple sclerosis, macular pucker, Behcet's disease, Coats' disease, retinopathy of prematurity, open angle glaucoma, neovascular glaucoma, dry eye, allergic conjunctivitis, pterygium, branch retinal vein occlusion, adenovirus keratitis, corneal ulcers, vernal keratoconjunctivitis, blepharitis, epithelial basement membrane dystrophy, Stevens-Johnson syndrome, achromatophasia, corneal herpetic keratitis, keratoconus, rhegmatogenous retinal detachment, pseudo-exfoliation syndrome, proliferative vitreoretinopathy, infectious conjunctivitis, Stargardt disease, retinitis pigmentosa, Contact Lens-Induced Acute Red Eye (CLARE), conjunctivochalasis, inherited retinal disease, a retinal degenerative disease, an ocular disease or disorder exhibiting elevated levels of IL8, and an ocular disease or disorder exhibiting elevated levels of bisretinoids, such as, for example, N-retinylidene-N-retinylethanoloamine (A2E).

[0264] Additionally, or alternatively, the methods and compositions may involve the inhibition of a function associated with the combination of any two targets selected from the group consisting of VEGF-A, IL8, Ang2, C5, PDGF, FGF, and Factor D.

[0265] When the methods disclosed herein result in an inhibition of function or a reduction of symptoms or the like, the inhibition or reduction may be partial or complete. In certain embodiments, the inhibition or reduction is at least about 5%, at least about 10%, at least about 15%, at least about 20%, at least about 25%, at least about 30%, at least about 35%, at least about 40%, at least about 45%, at least about 50%, at least about 55%, at least about 60%, at least about 65%, at least about 70%, at least about 75%, at least about 80%, at least about 85%, at least about 90%, at least about 95% or at least about 100%.

[0266] In certain embodiments, the result of treatment is measured using visual functional outcomes measures, structural outcomes measures or patient self-reported outcome measures. In one embodiment, the result of treatment is measured (compared to baseline) for visual acuity, scotopic and mesopic microperimetry sensitivity, low luminance visual acuity, vanishing optotypes visual acuity, low luminance deficit or the like.

[0267] In a particular embodiment, treatment results in an increase in overall best corrected visual acuity (BCVA) as measured on the Early Treatment Diabetic Retinopathy Study (ETDRS) chart by at least 3 letters, at least 4 letters, at least 5 letters, at least 6 letters, at least 7 letters, at least 8 letters, at least 9 letters, at least 10 letters, at least 11 letters, at least 12 letters, at least 13 letters, at least 14 letters, at least 15 letters, at least 16 letters, at least 17 letters, at least 18 letters, at least 19 letters, at least 20 letters, or more than 20 letters as compared to an untreated control subject over a defined period of time, selected from at least one of 2 weeks, one month, 2 months, 3 months, 6 months, one year, 2 years, or 5 years.

[0268] In one embodiment, treatment results in a percentage of patients gaining >15 letters in BCVA from baseline of at least 10%, at least 15%, at least 20%, at least 25%, at least 30%, at least 35%, at least 40%, at least 45%, at least 50%, at least 55%, at least 60%, at least 65%, at least 70%, at least 75%, at least 80%, at least 85%, at least 90%, at least 95%, or more as compared to an untreated control subject over a defined period of time, selected from at least one of 2 weeks, one month, 2 months, 3 months, 6 months, one year, 2 years, or 5 years.

[0269] In one embodiment, treatment results in a percentage of patients gaining >10 letters in BCVA from baseline of at least 10%, at least 15%, at least 20%, at least 25%, at least 30%, at least 35%, at least 40%, at least 45%, at least 50%, at least 55%, at least 60%, at least 65%, at least 70%, at least 75%, at least 80%, at least 85%, at least 90%, at least 95%, or more as compared to an untreated control subject over a defined period of time, selected from at least one of 2 weeks, one month, 2 months, 3 months, 6 months, one year, 2 years, or 5 years.

[0270] In one embodiment, treatment results in a percentage of patients gaining >5 letters in BCVA from baseline of at least 10%, at least 15%, at least 20%, at least 25%, at least 30%, at least 35%, at least 40%, at least 45%, at least 50%, at least 55%, at least 60%, at least 65%, at least 70%, at least 75%, at least 80%, at least 85%, at least 90%, at least 95%, or more as compared to an untreated control subject over a defined period of time, selected from at least one of 2 weeks, one month, 2 months, 3 months, 6 months, one year, 2 years, or 5 years.

[0271] In one embodiment, treatment results in a percentage of patients avoiding the loss of ≥15 letters in BCVA from baseline of at least 10%, at least 15%, at least 20%, at least 25%, at least 30%, at least 35%, at least 40%, at least 45%, at least 50%, at least 55%, at least 60%, at least 65%, at least 70%, at least 75%, at least 80%, at least 85%, at least 90%, at least 95%, or more as compared to an untreated control subject over a defined period of time, selected from at least one of 2 weeks, one month, 2 months, 3 months, 6 months, one year, 2 years, or 5 years.

[0272] In one embodiment, treatment results in a percentage of patients avoiding the loss of ≥10 letters in BCVA from baseline of at least 10%, at least 15%, at least 20%, at least 25%, at least 30%, at least 35%, at least 40%, at least 45%, at least 50%, at least 55%, at least 60%, at least 65%, at least 70%, at least 75%, at least 80%, at least 85%, at least 90%, at least 95%, or more as compared to an untreated control subject over a defined period of time, selected from at least one of 2 weeks, one month, 2 months, 3 months, 6 months, one year, 2 years, or 5 years.

[0273] In one embodiment, treatment results in a percentage of patients avoiding the loss of ≥5 letters in BCVA from baseline of at least 10%, at least 15%, at least 20%, at least 25%, at least 30%, at least 35%, at least 40%, at least 45%, at least 50%, at least 55%, at least 60%, at least 65%, at least 70%, at least 75%, at least 80%, at least 85%, at least 90%, at least 95%, or more as compared to an untreated control subject over a defined period of time, selected from at least one of 2 weeks, one month, 2 months, 3 months, 6 months, one year, 2 years, or 5 years.

[0274] In one embodiment, treatment results in a percentage of patients avoiding the loss of ≥0 letters in BCVA from baseline of at least 10%, at least 15%, at least 20%, at least 25%, at least 30%, at least 35%, at least 40%, at least 45%, at least 50%, at least 55%, at least 60%, at least 65%, at least 70%, at least 75%, at least 80%, at least 85%, at least 90%, at least 95%, or more as compared to an untreated control subject over a defined period of time, selected from at least one of 2 weeks, one month, 2 months, 3 months, 6 months, one year, 2 years, or 5 years.

[0275] In a particular embodiment, treatment results in a reduction of retinal fluid as measured by fluorescein angiography (FA) and optical coherence tomography (OCT) of at least 10%, at least 15%, at least 20%, at least 25%, at least 30%, at least 35%, at least 40%, at least 45%, at least 50%, at least 55%, at least 60%, at least 65%, at least 70%, at least 75%, at least 80%, at least 85%, at least 90%, at least 95%, or more as compared to an untreated control subject over a defined period of time, selected from at least one of 2 weeks, one month, 2 months, 3 months, 6 months, one year, 2 years, or 5 years.

[0276] In a particular embodiment, treatment results in a reduction of retinal thickness as measured by fluorescein angiography (FA) and optical coherence tomography (OCT) of at least 10%, at least 15%, at least 20%, at least 25%, at least 30%, at least 35%, at least 40%, at least 45%, at least 50%, at least 55%, at least 60%, at least 65%, at least 70%, at least 75%, at least 80%, at least 85%, at least 90%, at least 95%, or more as compared to an untreated control subject over a defined period of time, selected from at least one of 2 weeks, one month, 2 months, 3 months, 6 months, one year, 2 years, or 5 years.

[0277] In a particular embodiment, treatment results in a reduction of the total area of choroidal neovascular (CNV) lesions as measured by fluorescein angiography (FA) and optical coherence tomography (OCT) of at least 10%, at least 15%, at least 20%, at least 25%, at least 30%, at least 35%, at least 40%, at least 45%, at least 50%, at least 55%, at least 60%, at least 65%, at least 70%, at least 75%, at least 80%, at least 85%, at least 90%, at least 95%, or more as compared to an untreated control subject over a defined period of time, selected from at least one of 2 weeks, one month, 2 months, 3 months, 6 months, one year, 2 years, or 5 years.

[0278] In a particular embodiment, administration of an effective amount of the bispecific aptamer or pharmaceutical composition comprising the same refers to the amount of the bispecific aptamer or pharmaceutical composition disclosed herein that that decreases the loss of overall visual acuity, the loss of visual field, by at least about 10%, at least about 15%, at least about 20%, at least about 25%, at least about 30%, at least about 35%, at least about 40%, at least about 45%, at least about 50%, at least about 55%, at least about 60%, at least about 65%, at least about 70%, at least about 75%, at least about 80%, at least about 85%, at least about 90%, at least about 95%, or more as compared to an untreated control subject over a defined period of time, selected from at least one of 2 weeks, one month, 2 months, 3 months, 6 months, one year, 2 years, or 5 years.

[0279] Also provided are kits. Such kits can include the bispecific aptamer described herein and, in certain embodiments, instructions for administration. Such kits can facilitate performance of the methods described herein. When supplied as a kit, the different components of the compositions disclosed herein can be packaged in separate containers and admixed immediately before use. In one embodiment, the bispecific composition is formulated as a pre-filled syringe.

### V. Aptamers

[0280] In certain embodiments, the methods and compositions described herein use bispecific aptamers for the treatment of an ocular disease. In certain embodiments, the methods and compositions described herein may use one or more anti-VEGF aptamers, one of more anti-IL8 aptamers or one or more anti-Ang2 aptamers. In certain embodiments, the methods and compositions described herein utilize one or more aptamers for inhibiting an activity associated with VEGF, IL8, or Ang2.

[0281] Aptamers and bispecific aptamers described herein may include any number of modifications that can affect the function or affinity of the aptamer. For example, aptamers may be unmodified or they may contain modified nucleotides to improve stability, nuclease resistance or delivery characteristics. Examples of such modifications may include chemical substitutions at the sugar and/or phosphate and/or base positions, for example, at the 2′ position of ribose, the 5 position of pyrimidines, the 8 position of purines. Various 2′-modified pyrimidines and purines are well-known, including modifications of 2′-amino (2′—NH₂), 2′-fluoro (2′-F), and/or 2′-O-methyl (2′-OMe) substituents. In certain embodiments, aptamers described herein comprise a 2′-OMe and/or a 2′F modification to increase in vivo stability. In certain embodiments, the aptamers described herein contain modified nucleotides to improve the affinity and specificity of the aptamers for a target. Examples of modified nucleotides include those modified with guanidine, indole, amine, phenol, hydroxymethyl, or boronic acid. In other cases, pyrimidine nucleotide triphosphate analogs or CE-phosphoramidites may be modified at the 5 position to generate, for example, 5-benzylaminocarbonyl-2 ′-deoxyuridine (BndU); 5-[N-(phenyl-3-propyl)carboxamide]-2′-deoxyuridine (PPdU); 5-(N-thiophenylmethylcarboxyamide)-T-deoxyuridine (ThdU); 5-(N-4-fluorobenzylcarboxyamide)-2′-deoxyuridine (FBndU); 5-(N-(1-naphthylmethyl)carboxamide)-2′-deoxyuridine (NapdU); 5-(N-2-naphthylmethylcarboxyamide)-2′-deoxyuridine (2NapdU); 5-(N-1-naphthylethylcarboxyamide)-T-deoxyuridine (NEdU); 5-(N-2-naphthylethylcarboxyamide)-2′-deoxyuridine (2NEdU); 5-(N-tryptaminocarboxyamide)-2′-deoxyuridine (TrpdU); 5-isobutylaminocarbonyl-2 ′-deoxyuridine (IbdU); 5-(N-tyrosylcarboxyamide)-2 ′-deoxyuridine (TyrdU); 5-(N-isobutylaminocarbonyl-2′-deoxyuridine (iBudU); 5-(N-benzylcarboxyamide)-2′-5-(N-benzylcarboxyamide)-2′-fluorouridine, 5-(N-phenethylcarboxyamide)-2′-deoxyuridine (PEdU), 5-(N-3,4-methylenedioxybenzylcarboxyamide)-2′-deoxyuridine (MBndU), 5-(N-imidizolyethylcarboxyamide)-2′-deoxyuridine (ImdU), 5-(N-isobutylcarboxyamide)-2′-O-methyluridine, 5-(N-isobutylcarboxyamide)-2′-fluorouridine, 5-(N—R-threoninylcarboxyamide)-2′-deoxyuridine (ThrdU), 5-(N-tryptaminocarboxyamide)-2′-O-methyluridine, 5-(N-tryptaminocarboxyamide)-2′-fluorouridine, 5-(N-[1-(3-trimethylamonium)propyl[carboxyamide)-2′-deoxyuridine chloride, 5-(N-naphthylmethylcarboxyamide)-2′-O-methyluridine, 5-(N-naphthylmethylcarboxyamide)-2′-fluorouridine, 5-(N-[1-(2,3-dihydroxypropyl)]carboxyamide)-2′-deoxyuridine), 5-(N-2-naphthylmethylcarboxyamide)-2′-O-methyluridine, 5-(N-2-naphthylmethylcarboxyamide)-2′-fluorouridine, 5-(N-1-naphthylethylcarboxyamide)-2′-O-methyluridine, 5-(N-1-naphthylethylcarboxyamide)-2′-fluorouridine, 5-(N-2-naphthylethylcarboxyamide)-2′-O-methyluridine, 5-(N-2-naphthylethylcarboxyamide)-2′-fluorouridine, 5-(N-3-benzofuranylethylcarboxyamide)-2′-deoxyuridine (BFdU), 5-(N-3-benzofuranylethylcarboxyamide)-2′-O-methyluridine, 5-(N-3-benzofuranylethylcarboxyamide)-2′-fluorouridine, 5-(N-3-benzothiophenylethylcarboxyamide)-2′-deoxyuridine (BTdU), 5-(N-3-benzothiophenylethylcarboxyamide)-2′-O-methyluridine, 5-(N-3-benzothiophenylethylcarboxyamide)-2′-fluorouridine; 5-[N-(1-morpholino-2-ethyl)carboxamidel-2′-deoxyuridine (MOEdu); R-tetrahydrofuranylmethyl-2′-deoxyuridine (RTMdU); 3-methoxybenzyl-2′-deoxyuridine (3MBndU); 4-methoxybenzyl-2′-deoxyuridine (4MBndU); 3,4-dimethoxybenzyl-T-deoxyuridine (3,4DMBndU); S-tetrahydrofuranylmethyl-2′-deoxyuridine (STMdU); 3,4-methylenedioxyphenyl-2-ethyl-2′-deoxyuridine (MPEdU); 4-pyridinylmethyl-2′-deoxyuridine (PyrdU); or 1-benzimidazol-2-ethyl-2′-deoxyuridine (BidU); 5-(amino-1-propenyl)-2 ‘-deoxyuridine; 5-(indole-3-acetamido-1-propenyl)-2 ′-deoxyuridine; or 5-(4-pivaloylbenzamido-1-propenyl)-2′-deoxyuridine.

[0282] Modifications of the aptamers and bispecific aptamers contemplated in this disclosure include, without limitation, those which provide other chemical groups that incorporate additional charge, polarizability, hydrophobicity, hydrogen bonding, electrostatic interaction, and functionality to the nucleic acid aptamer bases or to the nucleic acid aptamer as a whole. Modifications to generate oligonucleotide populations that are resistant to nucleases can also include one or more substitute internucleotide linkages, altered sugars, altered bases, or combinations thereof. Such modifications include, but are not limited to, 2’-position sugar modifications, 5-position pyrimidine modifications, 8-position purine modifications, modifications at exocyclic amines, substitution of 4-thiouridine, substitution of 5-bromo or 5-iodo-uracil; backbone modifications, phosphorothioate, phosphorodithioate, or alkyl phosphate modifications, methylations, and unusual base-pairing combinations such as the isobases isocytidine and isoguanosine. Modifications can also include 3′ and 5′ modifications such as capping, e.g., addition of a 3′-3′-dT cap to increase exonuclease resistance.

[0283] Aptamers and bispecific aptamers of the disclosure may generally comprise nucleotides having ribose in the β-D-ribofuranose configuration. In certain embodiments, 100% of the nucleotides present in the aptamer have ribose in the β-D-ribofuranose configuration. In certain embodiments, at least 50% of the nucleotides present in the aptamer have ribose in the β-D-ribofuranose configuration. In certain embodiments, at least 10%, at least 20%, at least 30%, at least 40%, at least 50%, at least 60%, at least 70%, at least 80%, at least 90%, or 100% of the nucleotides present in the aptamer have ribose in the β-D-ribofuranose configuration.

[0284] The length of the aptamer or aptamer domain within a bispecific aptamer can be variable. In certain embodiments, the length is less than 100 nucleotides. In certain embodiments, the length is greater than 10 nucleotides. In certain embodiments, the length is between 10 and 90 nucleotides. The aptamer comprising an aptamer domain of a bispecific aptamer can be, without limitation, about 10, about 15, about 20, about 25, about 30, about 35, about 40, about 45, about about 55, about 60, about 65, about 70, about 75, about 80, about 85, or about 90 nucleotides in length.

[0285] In one embodiment, the bispecific aptamer is 8, 9, 10, 11, 12, 13, 14, 15, 16, 17, 18, 19, 20, 21, 22, 23, 24, 25, 26, 27, 28, 29, 30, 31, 32, 33, 34, 35, 36, 37, 38, 39, 40, 41, 42, 43, 44, 45, 46, 47, 48, 49, 50, 51, 52, 53, 54, 55, 56, 57, 58, 59, 60, 61, 62, 63, 64, 65, 66, 67, 68, 69, 70, 71, 72, 73, 74, 75, 76, 77, 78, 79, 80, 81, 82, 83, 84, 85, 86, 87, 88, 89, 90, 91, 92, 93, 94, 95, 96, 97, 98, 99, or 100 nucleotides in length.

[0286] In certain embodiments, the nucleic acid sequence of the VEGF-A aptamer domain of the bispecific composition, may have a degree of primary sequence identity with one of SEQ ID NOS: 1-46, that is at least one of 75%, 76%, 77%, 78%, 79%, 80%, 81%, 82%, 83%, 84%, 85%, 86%, 87%, 88%, 89%, 90%, 91%, 92%, 93%, 94%, 95%, 96%, 97%, 98%, 99%, or 100%. In certain embodiments, the nucleic acid sequence of the IL8 aptamer domain of the bispecific composition, may have a degree of primary sequence identity with one of SEQ ID NOS: 47-48, that is at least one of 75%, 76%, 77%, 78%, 79%, 80%, 81%, 82%, 83%, 84%, 85%, 86%, 87%, 88%, 89%, 90%, 91%, 92%, 93%, 94%, 95%, 96%, 97%, 98%, 99%, or 100%. In certain embodiments, the nucleic acid sequence of the Ang2 aptamer domain of the bispecific composition, may have a degree of primary sequence identity with one of SEQ ID NOS: 49-50, that is at least one of 75%, 76%, 77%, 78%, 79%, 80%, 81%, 82%, 83%, 84%, 85%, 86%, 87%, 88%, 89%, 90%, 91%, 92%, 93%, 94%, 95%, 96%, 97%, 98%, 99%, or 100%. In certain embodiments, the nucleic acid sequence of the C5 aptamer domain of the bispecific composition, may have a degree of primary sequence identity with SEQ ID NO: 51, that is at least one of 75%, 76%, 77%, 78%, 79%, 80%, 81%, 82%, 83%, 84%, 85%, 86%, 87%, 88%, 89%, 90%, 91%, 92%, 93%, 94%, 95%, 96%, 97%, 98%, 99%, or 100%. In certain embodiments, the nucleic acid sequence of the PDGF aptamer domain of the bispecific composition, may have a degree of primary sequence identity with SEQ ID NO: 52, that is at least one of 75%, 76%, 77%, 78%, 79%, 80%, 81%, 82%, 83%, 84%, 85%, 86%, 87%, 88%, 89%, 90%, 91%, 92%, 93%, 94%, 95%, 96%, 97%, 98%, 99%, or 100%. In certain embodiments, the nucleic acid sequence of the FGF2 aptamer domain of the bispecific composition, may have a degree of primary sequence identity with SEQ ID NO: 53, that is at least one of 75%, 76%, 77%, 78%, 79%, 80%, 81%, 82%, 83%, 84%, 85%, 86%, 87%, 88%, 89%, 90%, 91%, 92%, 93%, 94%, 95%, 96%, 97%, 98%, 99%, or 100%. In certain embodiments, the nucleic acid sequence of the Factor D aptamer domain of the bispecific composition, may have a degree of primary sequence identity with SEQ ID NO: 54, that is at least one of 75%, 76%, 77%, 78%, 79%, 80%, 81%, 82%, 83%, 84%, 85%, 86%, 87%, 88%, 89%, 90%, 91%, 92%, 93%, 94%, 95%, 96%, 97%, 98%, 99%, or 100%. In some instances, a polyethylene glycol (PEG) polymer chain is covalently bound to the aptamer or bispecific aptamer, referred to herein as PEGylation. Without wishing to be bound by theory, PEGylation may increase the half-life and stability of the aptamer in physiological conditions. In certain embodiments, the PEG polymer is covalently bound to the 5′ end of the aptamer or bispecific aptamer. In certain embodiments, the PEG polymer is covalently bound to the 3′ end of the aptamer or bispecific aptamer. In certain embodiments, the PEG polymer is covalently bound to both the 5′ end and the 3′ end of the aptamer or bispecific aptamer. In certain embodiments, the PEG polymer is covalently bound to a specific site on a nucleobase within the aptamer, including the 5-position of a pyrimidine or 8-position of a purine. In certain embodiments, the PEG polymer is covalently bound to a basic site within the aptamer or bispecific aptamer. In certain embodiments, the PEG polymer is covalently bound to the first aptamer domain within the bispecific aptamer. In certain embodiments, the PEG polymer is covalently bound to the second aptamer domain within the bispecific aptamer. In certain embodiments, the PEG polymer is covalently bound to both aptamer domains within the bispecific aptamer.

### Polyethylene Glycol

[0287] In certain embodiments, an aptamer or bispecific aptamer described herein may be conjugated to a PEG having the general formula, H—(O—CH₂—CH₂)ₙ—OH. In certain embodiments, an aptamer or bispecific aptamer described herein may be conjugated to a methoxy-PEG (mPEG) of the general formula, CH₃O—(CH₂—CH₂—O)ₙ—H. In certain embodiments, the aptamer or bispecific aptamer is conjugated to a linear chain PEG or mPEG. The linear chain PEG or mPEG may have an average molecular weight of up to about 30 kD. Multiple linear chain PEGs or mPEGs can be linked to a common reactive group to form multi-arm or branched PEGs or mPEGs. For example, more than one PEG or mPEG can be linked together through an amino acid linker (e.g., lysine) or another linker, such as glycerine. In certain embodiments, the aptamer or bispecific aptamer is conjugated to a branched PEG or branched mPEG. Branched PEGs or mPEGs may be referred to by their total mass (e.g., two linked 20 kD mPEGs have a total molecular weight of 40 kD).

[0288] Branched PEGs or mPEGs may have more than two arms. Multi-arm branched PEGs or mPEGs may be referred to by their total mass (e.g., four linked 10 kD mPEGs have a total molecular weight of 40 kD). In certain embodiments, an aptamer or bispecific aptamer of the present disclosure is conjugated to a PEG polymer having a total molecular weight from about 5 kD to about 200 kD, for example, about 5 kD, about 10 kD, about 20 kD, about 30 kD, about 40 kD, about 50 kD, about 60 kD, about 70 kD, about 80 kD, about 90 kD, about 100 kD, about 110 kD, about 120 kD, about 130 kD, about 140 kD, about 150 kD, about 160 kD, about 170 kD, about 180 kD, about 190 kD, or about 200 kD. In one non-limiting example, the aptamer or bispecific aptamer is conjugated to a PEG having a total molecular weight of about 40 kD.

[0289] In certain embodiments, the reagent that may be used to generate PEGylated aptamers is a branched PEG N-Hydroxysuccinimide (mPEG-NHS) having the general formula:

[chemical structure]

[0290] with a 20 kD, 40 kD or 60 kD total molecular weight (e.g., where each mPEG is about 10 kD, 20 kD or about 30 kD). As described above, the branched PEGs can be linked through any appropriate reagent, such as an amino acid (e.g., lysine or glycine residues).

[0291] In one non-limiting example, the reagent used to generate PEGylated aptamers is [N²-(monomethoxy 20K polyethylene glycol carbamoyl)-N⁶-(monomethoxy 20K polyethylene glycol carbamoyl)]-lysine N-hydroxysuccinimide having the formula:

[chemical structure]

[0292] In yet another non-limiting example, the reagent used to generate PEGylated aptamers or bispecific aptamers has the formula:

[chemical structure]

[0293] where X is N-hydroxysuccinimide and the PEG arms are of approximately equivalent molecular weight. Such PEG architecture may provide a compound with reduced viscosity compared to a similar aptamer conjugated to a two-armed or single-arm linear PEG.

[0294] In some examples, the reagent used to generate PEGylated aptamers has the formula:

[chemical structure]

[0295] where X is N-hydroxysuccinimide and the PEG arms are of different molecular weights, for example, a 40 kD PEG of this architecture may be composed of 2 arms of 5 kD and 4 arms of 7.5 kD. Such PEG architecture may provide a compound with reduced viscosity compared to a similar aptamer conjugated to a two-armed PEG or a single-arm linear PEG.

[0296] In certain embodiments, the reagent that may be used to generate PEGylated aptamers is a non-branched mPEG-Succinimidyl Propionate (mPEG-SPA), having the general formula:

[chemical structure]

[0297] where mPEG is about 20 kD or about 30 kD. In one example, the reactive ester may be —O—CH₂—CH₂—CO₂—NHS.

[0298] In some embodiments, the reagent that may be used to generate PEGylated aptamers may include a branched PEG linked through glycerol, such as the SUNBRIGHT® series from NOF Corporation, Japan. Non-limiting examples of these reagents include:

[chemical structure]

[0299] In another embodiment, the reagents may include a non-branched mPEG Succinimidyl alpha-methylbutanoate (mPEG-SMB) having the general formula:

[chemical structure]

[0300] where mPEG is between 10 and 30 kD. In one example, the reactive ester may be —O—CH₂—CH₂—CH(CH₃)—CO₂—NHS.

[0301] In certain embodiments, the PEG reagents may include nitrophenyl carbonate-linked PEGs, having the general formula:

[chemical structure]

[0302] Compounds including nitrophenyl carbonate can be conjugated to primary amine containing linkers.

[0303] In certain embodiments, the reagents used to generate PEGylated aptamers may include PEG with thiol-reactive groups that can be used with a thiol-modified linker. One non-limiting example may include reagents having the following general structure:

[chemical structure]

[0304] where mPEG is about 10 kD, about 20 kD or about 30 kD.

[0305] In certain embodiments, the reagents used to generate PEGylated aptamers may include reagents having the following structure:

[chemical structure]

[0306] where each mPEG is about 10 kD, about 20 kD, or about 30 kD and the total molecular weight is about 20 kD, about 40 kD, or about 60 kD, respectively. Branched PEGs with thiol reactive groups that can be used with a thiol-modified linker, as described above, may include reagents in which the branched PEG has a total molecular weight of about 40 kD or about 60 kD (e.g., where each mPEG is about 20 kD or about 30 kD).

[0307] In certain embodiments, the reagents used to generate PEGylated aptamers may include reagents having the following structure:

[chemical structure]

[0308] In certain embodiments, the reaction to conjugate the PEG to the aptamer is carried out between about pH 6 and about pH 10, or between about pH 7 and pH 9 or about pH 8.

[0309] In certain embodiments, the reagents used to generate PEGylated aptamers or bispecific aptamers may include reagents having the following structure:

[chemical structure]

[0310] In certain embodiments, the reagents used to generate PEGylated aptamers may include reagents having the following structure:

[chemical structure]

[0311] In certain embodiments, the reagents used to generate PEGylated aptamers may include reagents having the following structure:

[chemical structure]

[0312] In certain embodiments, the reagents used to generate PEGylated aptamers may include reagents having the following structure:

[chemical structure]

[0313] In certain embodiments, the reagents used to generate PEGylated aptamers may include reagents having the following structure:

[chemical structure]

[0314] In certain embodiments, the reagents used to generate PEGylated aptamers may include reagents having the following structure:

[chemical structure]

[0315] In certain embodiments, the aptamer is associated with a single PEG molecule. In other cases, the aptamer or bispecific aptamer is associated with two or more PEG molecules.

[0316] In certain embodiments, the aptamers or bispecific aptamers described herein may be bound or conjugated to one or more molecules having desired biological properties. Any number of molecules can be bound or conjugated to aptamers, non-limiting examples including antibodies, peptides, proteins, carbohydrates, enzymes, polymers, drugs, small molecules, gold nanoparticles, radiolabels, fluorescent labels, dyes, haptens (e.g., biotin), other aptamers, or nucleic acids (e.g., siRNA). In certain embodiments, aptamers may be conjugated to molecules that increase the stability, the solubility or the bioavailability of the aptamer. Non-limiting examples include polyethylene glycol (PEG) polymers, carbohydrates and fatty acids. In certain embodiments, molecules that improve the transport or delivery of the aptamer may be used, such as cell penetrating peptides. Non-limiting examples of cell penetrating peptides can include peptides derived from Tat, penetratin, polyarginine peptide Arg8 sequence, Transportan, VP22 protein from Herpes Simplex Virus (HSV), antimicrobial peptides such as Buforin I and SynB, polyproline sweet arrow peptide molecules, Pep-1 and MPG. In some embodiments, the aptamer is conjugated to a lipophilic compound such as cholesterol, dialkyl glycerol, diacyl glycerol, or a non-immunogenic, high molecular weight compound or polymer such as polyethylene glycol (PEG) or other water-soluble pharmaceutically acceptable polymers including, but not limited to, polyaminoamines (PAMAM) and polysaccharides such as dextran, or polyoxazolines (POZ).

[0317] The molecule to be conjugated can be covalently bonded or can be associated through non-covalent interactions with the aptamer of interest. In one example, the molecule to be conjugated is covalently attached to the aptamer or bispecific aptamer. The covalent attachment may occur at a variety of positions on the aptamer, for example, to the exocyclic amino group on the base, the of a pyrimidine nucleotide, the 8-position of a purine nucleotide, the hydroxyl group of the phosphate, or a hydroxyl group or other group at the 5′ or 3′ terminus. In one example, the covalent attachment is to the 5′ or 3′ hydroxyl group of the aptamer.

### Hydrodynamic Radius

[0318] An advantage for a bispecific aptamer over a co-administration or co-formulation is the increase in hydrodynamic radius. Molecular size is a key attribute for lowering diffusion from the eye. Molecular size can be measured in two ways, molecular weight, and hydrodynamic radius (Rh). For molecules with larger hydrodynamic radius, there is a great correlation between the physical size of the molecule while in the eye and its clearance rate.

[0319] The aptamers shown on FIG. 2 are all single aptamers conjugated to a PEG carrier for pharmacokinetic (PK) extension. The ability to make the aptamer portion larger due to the addition of a second aptamer domain prior to adding PEG will provide several advantages. Shatz et al. has shown that larger Rh results in a longer half-life in rabbits. In turn this longer half-life in rabbits reliably translates to a longer half-life in humans. The larger Rh for the bispecific combined with high solubility gives the bispecific aptamer compositions an advantage over current antibody and antibody fragment products. The ability to then conjugate to PEG molecules as needed will provide an even longer boost to duration.

### Linkers

[0320] In certain embodiments, the aptamer or bispecific aptamer can be attached to another molecule directly or with the use of a spacer or linker. For example, a lipophilic compound or a non-immunogenic, high molecular weight compound can be attached to the aptamer using a linker or a spacer. Various linkers and attachment chemistries are known in the art. In a non-limiting example, 6-(trifluoroacetamido)hexanol (2-cyanoethyl-N,N-diisopropyl)phosphoramidite can be used to add a hexylamino linker to the 5′ end of the synthesized aptamer. This linker, as with the other amino linkers provided herein, once the group protecting the amine has been removed, can be reacted with PEG-NHS esters to produce covalently linked PEG-aptamers. Other non-limiting examples of linker phosphoramidites may include: TFA-amino C4 CED phosphoramidite having the structure:

[chemical structure]

5′-amino modifier C3 TFA having the structure:

[chemical structure]

MMT amino modifier C6 CED phosphoramidite having the structure:

[chemical structure]

5′-amino modifier 5 having the structure:

[chemical structure]

5′-modifier C12 having the structure:

[chemical structure]

5′ thiol-modifier C6 having the structure:

[chemical structure]

5′thiol-modifier C6 having the structure:

[chemical structure]

and 5′ thiol-modifier C6 having the structure:

[chemical structure]

[0321] The 5′-thiol modified linker may be used, for example, with PEG-maleimides, PEG-vinylsulfone, PEG-iodoacetamide and PEG-orthopyridyl-disulfide. In one example, the aptamer may be bonded to the 5′-thiol through a maleimide or vinyl sulfone functionality.

[0322] In certain embodiments, the aptamer or bispecific aptamer formulated according to the present disclosure may also be modified by encapsulation within or displayed on the surface of a liposome. In other cases, the aptamer formulated according to the present disclosure may also be modified by encapsulation within or displayed on the surface of a micelle. Liposomes and micelles may be comprised of any lipids, and in certain embodiments the lipids may be phospholipids, including phosphatidylcholine. Liposomes and micelles may also contain or be comprised in part or in total of other polymers and amphipathic molecules including PEG conjugates of poly lactic acid (PLA), poly DL-lactic-co-glycolic acid (PLGA), or poly caprolactone (PCL).

### VI. Pharmaceutical Compositions and Formulations

[0323] Also disclosed are aptamers or bispecific aptamers prepared as pharmaceutical compositions. Compositions as described herein may comprise a liquid formulation, a solid formulation or a combination thereof. Non-limiting examples of formulations may include a tablet, a capsule, a gel, a paste, a liquid solution and a cream. The compositions of the present disclosure may further comprise any number of excipients. Excipients may include any and all solvents, coatings, flavorings, colorings, lubricants, disintegrants, preservatives, sweeteners, binders, diluents, and vehicles (or carriers). Generally, the excipient is compatible with the therapeutic compositions of the present disclosure. The pharmaceutical composition may also contain minor amounts of non-toxic auxiliary substances such as wetting or emulsifying agents, pH buffering agents, and other substances such as, for example, sodium acetate, and triethanolamine oleate.

[0324] Therapeutic doses of formulations disclosed herein can be administered to a subject in need thereof. In certain embodiments, a formulation is administered to the eye of a subject to treat, for example, wet AMD, diabetic retinopathy, diabetic macular edema, retinal vein occlusion, branched retinal vein occlusion, central retinal vein occlusion, retinopathy of prematurity, radiation retinopathy, dry AMD, or geographic atrophy. Administration to the eye can be a) topical; b) local ocular delivery; or c) systemic. A topical formulation can be applied directly to the eye (e.g., eye drops, contact lens loaded with the formulation) or to the eyelid (e.g., cream, lotion, gel). In certain embodiments, topical administration can be to a site remote from the eye, for example, to the skin of an extremity. This form of administration may be suitable for targets that are not produced directly by the eye. In certain embodiments, a formulation of the disclosure is administered by local ocular delivery. Non-limiting examples of local ocular delivery include intravitreal (IVT), intracamarel, subconjunctival, subtenon, suprachoroidal, retrobulbar, posterior juxtascleral, and peribulbar. In certain embodiments, a formulation of the disclosure is delivered by intravitreal administration (IVT). Local ocular delivery may generally involve injection of a liquid formulation. In other cases, a formulation of the disclosure is administered systemically. Systemic administration can involve oral administration. In certain embodiments, systemic administration can be intravenous administration, subcutaneous administration, infusion, implantation, and the like.

[0325] Other formulations suitable for delivery of the pharmaceutical compositions described herein may include a sustained release gel or polymer formulations by surgical implantation of a biodegradable microsize polymer system, e.g., microdevice, microparticle, or sponge, or other slow release transscleral devices, implanted during the treatment of an ophthalmic disease, or by an ocular delivery device, e.g. polymer contact lens sustained delivery device. In certain embodiments, the formulation is a polymer gel, a self-assembling gel, a durable implant, an eluting implant, a biodegradable matrix or biodegradable polymers. In certain embodiments, the formulation may be administered by iontophoresis using electric current to drive the composition from the surface to the posterior of the eye. In certain embodiments, the formulation may be administered by a surgically implanted port with an intravitreal reservoir, an extra-vitreal reservoir or a combination thereof. Examples of implantable ocular devices can include, without limitation, the Durasert® technology developed by Bausch & Lomb, the ODTx device developed by On Demand Therapeutics, the Port Delivery System developed by ForSight VISION4 and the Replenish MicroPump® System developed by Replenish, Inc.

[0326] In certain embodiments, nanotechnologies can be used to deliver the pharmaceutical compositions including nanospheres, nanoparticles, nanocapsules, liposomes, nanomicelles and dendrimers.

[0327] The composition disclosed herein can be administered once or more than once each day. In certain embodiments, the composition is administered as a single dose (i.e., one-time use). In this example, the single dose may be curative. In other cases, the composition may be administered serially (e.g., taken every day without a break for the duration of the treatment regimen). In certain embodiments, the treatment regime can be less than a week, a week, two weeks, three weeks, a month, or greater than a month. In certain embodiments, the composition is administered once over a period of at least 12 weeks. In certain embodiments, the composition is administered once over a period of at least 16 weeks. In certain embodiments, the composition is administered once over a period of at least 20 weeks. In certain embodiments, the composition is administered once over a period of at least 24 weeks. In certain embodiments, the composition is administered once over a period of at least 28 weeks. In certain embodiments, the composition is administered once over a period of at least 32 weeks. In certain embodiments, the composition is administered once over a period of at least 36 weeks. In certain embodiments, the composition is administered once over a period of at least 40 weeks. In certain embodiments, the composition is administered once over a period of at least 44 weeks. In certain embodiments, the composition is administered once over a period of at least 48 weeks. In certain embodiments, the composition is administered once over a period of at least 52 weeks. In certain embodiments, the composition is administered as a loading dose of one injection every four weeks for three months Bispecific aptamer compositions as described herein may be particularly advantageous over current approaches as they may sustain therapeutic intravitreal concentrations of drug for longer periods of time, thus requiring less frequent administration. For example, an anti-VEGF-A antibody or Fab may show clinical efficacy for the treatment of wet age-related macular degeneration at 10 mg when dosed every 4 weeks (q4w) but not every 8 weeks (q8w). The bispecific aptamers described herein have a longer intraocular half-life, and/or sustain therapeutic intravitreal concentrations of drug for longer periods of time, than an anti-VEGF-A antibody or Fab and other antibody therapies and thus, can be dosed less frequently. In certain embodiments, the bispecific aptamers are dosed at least every 4 weeks (q4w), every 5 weeks (q5w), every 6 weeks (q6w), every 7 weeks (q7w), every 8 weeks (q8w), every 9 weeks (q9w), every 10 weeks (q10w), every 11 weeks (q11w), every 12 weeks (q12w), every 13 weeks (q13w), every 14 weeks (q14w), every 15 weeks (q15w), every 16 weeks (q16w), every 17 weeks (q17w), every 18 weeks (q18w), every 19 weeks (q19w), every 20 weeks (q20w), every 21 weeks (q21w), every 22 weeks (q22w), every 23 weeks (q23w), every 24 weeks (q24w) or greater than q24w.

[0328] The compositions herein may include any number of pharmaceutical compositions for the treatment of ocular diseases or disorders as well as any type of formulation containing a PEGylated bispecific aptamer composition provided herein. The pharmaceutical compositions may include a therapeutically effective amount of any composition as described herein (e.g., a therapeutic bispecific aptamer conjugated to a PEG reagent). In certain embodiments, the formulation or pharmaceutical composition provided herein contains a PEGylated bispecific aptamer provided herein and another substance or component provided herein, such as a liquid or buffer.

[0329] In certain embodiments, the pharmaceutical composition or formulation is solely composed of PEGylated bispecific aptamers. In other cases, the formulation or pharmaceutical composition is substantially composed of PEGylated bispecific aptamers (e.g., greater than about 70%, greater than about 80%, greater than about 90%, greater than about 95% composed of PEGylated bispecific aptamers). In other cases, the formulation or pharmaceutical composition is mostly composed of PEGylated bispecific aptamers (e.g., greater than about 50% PEGylated aptamers). In certain embodiments, the PEGylated bispecific aptamer is a minor constituent of the pharmaceutical formulation. In certain embodiments, the PEGylated bispecific aptamer makes up less than about 20%, less than about 10%, or less than about 5% of the pharmaceutical formulation or composition. In certain embodiments, the PEGylated bispecific aptamer makes up from about 3% to about 5% of the pharmaceutical formulation or composition.

[0330] The formulation or pharmaceutical composition may further include any number of excipients, vehicles or carriers. For example, the pharmaceutical composition may include a therapeutically effective amount of the bispecific composition, alone or in combination, with one or more vehicles (e.g., pharmaceutically acceptable compositions or e.g., pharmaceutically acceptable carriers). Excipients may include any and all buffers, solvents, lubricants, preservatives, diluents, and vehicles (or carriers). Generally, the excipient is compatible with the compositions described herein. The pharmaceutical composition may also contain minor amounts of non-toxic auxiliary substances such as wetting or emulsifying agents, pH buffering agents, and other substances such as, for example, sodium acetate, and triethanolamine oleate.

[0331] In certain embodiments, a therapeutically effective amount of the bispecific composition is administered to a subject. The term “therapeutically effective amount” refers to an amount of the composition that provokes a therapeutic or desired response in a subject. In certain embodiments, the therapeutic or desired response is the alleviation or reduction of one or more symptoms associated with a disease or disorder. In certain embodiments, a therapeutic or desired response is prophylactic treatment of a disease or a disorder. The therapeutically effective amount of the composition may be dependent on the route of administration. In the case of systemic administration, a therapeutically effective amount may be about 10 mg/kg to about 100 mg/kg. In certain embodiments, a therapeutically effective amount may be about 10 mg/kg to about 1000 mg/kg for systemic administration. For intravitreal administration, a therapeutically effective amount can be about 0.01 mg to about 150 mg in about 25 μl to about 100 μl injection volume per eye.

[0332] The pharmaceutical compositions may be administered in a dose that is sufficient to cause a therapeutic benefit to or a therapeutic response in the subject. The dose may vary depending on a variety of factors including the bispecific aptamer and the PEG reagent selected for use. In certain embodiments, a therapeutically effective amount of a PEGylated bispecific aptamer of the disclosure (e.g., a bispecific aptamer attached to a PEG having 2, 3 or more arms) may be administered to a subject in a relatively small volume. In certain embodiments, a therapeutically effective amount of a bispecific aptamer attached to a PEG reagent having 2 or more arms may be administered to a subject in a smaller volume than a bispecific aptamer attached to a PEG reagent having less than 2 arms. In certain embodiments, a therapeutically effective amount of a bispecific aptamer attached to a PEG reagent having 3 or more arms may be administered to a subject in a smaller volume than a bispecific aptamer attached to a PEG reagent having less than 3 arms. For example, because of the surprising benefits of using a PEG reagent having 3 or more arms (e.g., lower viscosity, higher injectability, etc.), a formulation comprising a PEGylated bispecific aptamer of the disclosure may be more concentrated (and hence, require a smaller administration volume). In certain embodiments, the therapeutic composition/formulation may enable a therapeutically effective amount to be delivered to a subject in a single administration, e.g., a single injection, a single intravitreal injection. In certain embodiments, the therapeutic composition/formulation may possess a viscosity that enables a therapeutically effective amount to be delivered to a subject in a single administration, e.g., a single injection, a single intravitreal injection.

[0333] In certain embodiments, a therapeutically effective amount of an aptamer attached to a PEG reagent having 3 or more arms (e.g., 3 or more arms, 4 or more arms, etc.) may be less than a therapeutically effective amount of a bispecific aptamer attached to a PEG reagent having two or less arms. Without wishing to be bound by theory, this may be because an increased intravitreal retention time may reduce the amount of PEGylated bispecific aptamer needed to achieve a therapeutic response.

[0334] The pharmaceutical compositions herein generally may be administered by injection to the vitreous (i.e., intravitreal (IVT) administration). IVT administration may be to one eye if only one eye is affected by the ocular disease, or to both eyes if both eyes are affected. The pharmaceutical compositions herein may be in a formulation suitable for intravitreal administration. For example, the pharmaceutical compositions may be prepared in a liquid formulation for injection into the vitreous.

[0335] Liquid formulations provided herein may have low viscosity, e.g., a viscosity amenable to intravitreal injection, yet may also contain a relatively high concentration of PEGylated bispecific aptamer (e.g., about 25 mg/mL to about 60 mg/mL). In certain embodiments, the pharmaceutical composition may comprise a PEGylated bispecific aptamer concentration of at least about 25 mg/mL, at least about 30 mg/mL, at least 35 mg/mL, at least 40 mg/mL, at least 45 mg/mL, at least mg/mL or at least 60 mg/mL). In a specific example, a liquid formulation provided herein may have an aptamer concentration of PEGylated bispecific aptamer of greater than about 25 mg/ml or greater than about 30 mg/ml when formulated for intravitreal administration. In another specific example, a liquid formulation provided herein may have an aptamer concentration of PEGylated bispecific aptamer of greater than about 35 mg/ml when formulated for intravitreal administration. In another specific example, a liquid formulation provided herein may have an aptamer concentration of PEGylated bispecific aptamer of greater than about 40 mg/ml when formulated for intravitreal administration.

[0336] In certain embodiments, a liquid formulation as provided herein may be formulated in a pre-filled syringe. In certain embodiments, a liquid formulation may be formulated in a volume of about 10 μL, about 20 μL, about 30 μL, about 40 μL, about 50 μL, about 60 μL, about 70 μL, about 80 μL, about 90 μL, about 100 μL or greater than about 100 μL. Also provided herein are pre-filled syringes that contain a composition that comprises any of the PEGylated bispecific aptamers described herein.

[0337] As used herein, “polydispersity index” refers to a measure of the distribution of molecular mass in a given polymer sample. The polydispersity index, therefore, reflects the level of uniformity in a sample. The polydispersity index (PDI) of a solution may be calculated by the following formula: PDI=Mw/Mn, where Mw is the weight average molecular weight, and Mn is the number average molecule weight. Therefore, the greater the PDI of a solution, the broader the distribution of molecular mass within the sample. In certain embodiments, the therapeutic compositions provided herein may have a PDI of less than 1.05. That is, the molecular mass of PEGylated bispecific aptamers present in a therapeutic composition of the disclosure may be relatively uniform. In certain embodiments, the PDI of a therapeutic bispecific composition may be less than about 1.05, less than about 1.04, less than about 1.03, less than about 1.02, less than about 1.01, or about 1.00.

[0338] The compositions described herein may be co-administered with one or more additional therapeutic agents. The one or more additional therapeutic agents may be conjugated to a PEG reagent as described herein or may be unconjugated. The one or more additional therapeutic agents enhance or act synergistically in combination with the compositions provided herein.

[0339] The PEGylated bispecific aptamer may be administered to a subject by ocular delivery. In one embodiment, the PEGylated bispecific aptamer is administered by intravitreal injection. In one embodiment, the PEGylated bispecific aptamer is administered by periocular injection. In one embodiment, the PEGylated bispecific aptamer is administered by suprachoroidal injection. In one embodiment, the PEGylated bispecific aptamer is administered by subretinal injection.

[0340] In one embodiment the bispecific aptamer composition will be formulated in a prefilled syringe. In one embodiment, the prefilled syringe will be designed to deliver 50-100 uL. In one embodiment, the prefilled syringe will have a final total volume of 500 uL. In one embodiment, the prefilled syringe will be end sterilized prior to filling. In one embodiment, the barrel of the syringe is borosilicate glass type I with no printing. In one embodiment, the needle size will be 31 G. In one embodiment, the needle size will be 30 G. In one embodiment, the needle size will be 29 G. In one embodiment, the needle size will be 28 G. In one embodiment, the needle size will be 27 G. In one embodiment, the needle gauge will be large enough to produce an injection break force of less than 12 N. In one embodiment, the needle length will be approximately 12-13 mm. In one embodiment, the prefilled syringe will be siliconized, to ensure smooth glide for the stopper during injections.

### VII. General Method of Preparation

[0341] Oligonucleotide synthesis is a multi-step process involving solid phase chemical synthesis of the oligonucleotide strand; cleavage and deprotection of the crude oligonucleotide; purification by preparative anion exchange chromatography; desalting followed by PEGylation; purification of the PEGylated oligonucleotide by preparative anion exchange chromatography to remove unPEGylated oligonucleotide impurities; ultrafiltration for desalting; concentration and lyophilization of the final product. The entire process is schematically shown in the process flow diagram in FIG. 3.

[0342] Chemical Synthesis

[0343] Chemical synthesis of oligonucleotides via phosphoramidite chemistry involves sequential coupling of activated monomers to an elongating polymer, one terminus of which is covalently attached to a solid support matrix. The solid phase approach allows for easy purification of the reaction product at each step in the synthesis by simple solvent washing of the solid phase. The oligonucleotides are sequentially assembled from the 3′-end towards the 5′-end by deprotecting the 5′-end of the support-bound molecule, allowing the support-bound molecule to react with an incoming tetrazole-activated phosphoramidite monomer, oxidizing the resulting phosphite triester to a phosphate triester, and blocking any unreacted hydroxyl groups by acetylation (capping) to prevent non-sequential coupling with the next incoming monomer to form a “deletion sequence”. This sequence of steps is repeated for subsequent coupling reactions until the full-length oligonucleotides are synthesized. Due to the presence of a 3′-3′ linkage at the 3′ end and a C-6 linker for PEGylation at the 5′ end, the synthesis is modified at the first and last step to accommodate these changes.

[0344] Cleavage and Deprotection

[0345] Upon completion of the synthesis, the solid-support and associated oligonucleotide are transferred to a filter funnel, dried under vacuum and transferred to a reaction vessel. Ammonium hydroxide (28-30%) and methylamine (40% in water) are added to the solid support as a 1:1 solution (AMA) and the mixture is heated to approximately 45-60° C. for approximately 30 minutes to effect cleavage from the solid support, removal of the cyanoethyl phosphate protecting group, deprotection of exocyclic amine protecting groups as well as removal of the trifluoroacetyl group from the linker. The sample is cooled at −20° C. for 30 minutes to yield the crude oligonucleotide. The mixture is filtered under vacuum to remove the waste solid support. The reaction is quenched with glacial acetic acid to provide a pH neutral solution of crude product.

[0346] Anion Exchange Purification 1

[0347] The crude oligonucleotide is purified by preparative anion exchange chromatography. Purification is accomplished by eluting the product from the column through a controlled increase in sodium bromide concentration in the buffer system by increasing the proportion of Buffer B. Fractions are collected and analyzed by UV and IP RP-HPLC. Fractions are combined to yield a product pool of the desired purity, desalted by ultrafiltration and concentrated. The concentrated product is labeled and stored at 2-8° C.

[0348] The purified oligonucleotide intermediate is analyzed for MW by ES-MS, UV for oligonucleotide content and purity by IP RP-HPLC prior to proceeding to the PEGylation step.

[0349] PEGylation

[0350] The purified and concentrated oligonucleotide intermediate from above is reacted with 40K PEG at 25° C. in 0.1-0.2 M sodium borate buffer (— pH 8.8-9.8), DMSO, and acetonitrile for 60-min.

[0351] Anion Exchange Purification 2

[0352] The crude product is purified by preparative anion exchange chromatography to remove unPEGylated oligomer impurities. Purification is accomplished by eluting the product from the column through a controlled increase in sodium bromide concentration in the buffer system by increasing the proportion of Buffer B. Fractions are collected and analyzed for content and purity. Selected fractions are combined to yield a product pool of the desired purity.

[0353] Desalting and Concentration

[0354] The pooled fractions are desalted by ultrafiltration and concentrated. The concentrated product is labeled and stored at 2-8° C.

[0355] Lyophilization

[0356] API is aliquoted then freeze-dried to a dry, off-white to slightly yellow powder.

[0357] Storage of API

[0358] Lyophilized API is stored at −15° C. to −25° C.

### Example 1: Bispecific Aptamers Targeting VEGF and IL8 Generated By Direct Chemical Synthesis

[0359] An aptamer domain targeting VEGF and an aptamer domain targeting IL8 can be linked directly during solid phase chemical synthesis (FIGS. 4-6). To achieve this the anti-VEGF aptamer (aptamer 285 (SEQ ID NO: 1); CXACZCCGCGCGGAGGGXUUUCAUAAUCCCGUUUXUCX, where A, C and U are 2′OMe, G is 2′F G, X is 2′OMe G and Z is the 3-carbon non-nucleotidyl spacer is 1,3-propanediol) is linked at the 5′ end of a short nucleotide linker composed of five 2′OMe Uridine residues (UUUUU; where U is 2′OMe U), which in turn is linked to the 5′ end of the anti-IL8 aptamer (aptamer 269 (SEQ ID NO: 48); XXCXACXXUAXAUUAUGGGCAGUGUGACCXCXCC, where A, C and U are 2′OMe, G is 2′F G, X is 2′OMe G). The resulting bispecific aptamer sequence (SEQ ID NO: 60); (CXACZCCGCGCGGAGGGXUUUCAUAAUCCCGUUUXUCXUUUUU XXCXACXXUAXAUUAUGGGCAGUGUGACCXCXCC) where A, C and U are 2′OMe, G is 2′F G, X is 2′OMe G and Z is the 3-carbon non-nucleotidyl spacer is 1,3-propanediol) can be synthesized using a combination of commercially available 2′-fluoro-G and 2′—O-methyl (2′OMe) A/C/U/G modified phosphoramidites on a 3′ inverted deoxythymidine CPG support. The 5′ end of the aptamer is modified with a 5′ C6 amino modifier to facilitate conjugation to an activated PEG moiety.

[0360] Following synthesis, the bispecific aptamer is deprotected using the appropriate solvents and reagents capable of removing the phosphate protecting groups, removing the base protecting groups and cleaving the molecule from the support. For example, the bispecific aptamer could be treated with diethylamine in acetonitrile followed by aqueous 30% ammonium hydroxide or a mixture of aqueous 30% ammonium hydroxide and 40% methyl ammonium hydroxide. The deprotected bispecific aptamer is then desalted and used for PEG conjugation directly without additional purification.

[0361] Conjugation to a 40 kDa branched PEG is achieved by incubating the 5′ amine modified bispecific aptamer with a 1.5-5-fold molar excess of NHS activated SUNBRIGHT® GL2-400GS2 in 0.1M sodium bicarbonate buffer at pH 8.5. Following incubation, typically 2-20 hr, the PEGylated bispecific aptamer is purified by either anion exchange chromatography or ion paired reverse phase chromatography. The PEGylated bispecific aptamer is subsequently desalted prior to future use.

[0362] In some instances, the deprotected bispecific aptamer is purified by either anion exchange chromatography or ion paired reverse phase chromatography prior to PEG conjugation. Following purification, the bispecific aptamer is desalted into water and then combined with a 1.5-5 fold molar excess of NHS activated SUNBRIGHT® GL2-400GS2 in 0.1M sodium bicarbonate buffer at pH 8.5. Following incubation, typically 2-20 hr, the PEGylated bispecific aptamer is then purified by either anion exchange chromatography or ion paired reverse phase chromatography. The PEGylated bispecific aptamer is subsequently desalted prior to future use.

[0363] A number of variations to this approach can be utilized to achieve the same or similar end products. For example, the orientation of the aptamers could be reversed. That is, the bispecific aptamer could be constructed bearing a 5′ anti-VEGF domain and a 3′ anti-IL8 domain or a 5′ anti-IL8 domain and a 3′ anti-VEGF domain. Similarly, the length of the nucleotide linker or the sequence of the linker could be changed and that this would impart changes in the distance and/or geometry between the aptamer domains.

[0364] The bispecific aptamers generated using this approach could be linked with a non-nucleotidyl linker. Numerous non-nucleotidyl linkers are available commercially as phosphoramidtes. Other similar linkers can be readily synthesized using standard chemical approaches. The nucleotidyl linker could be, a 3-carbon non-nucleotidyl spacer such as 1,3-propanediol, a 6-carbon non-nucleotidyl spacer such as 1,6-hexanediol, a 9-atom spacer such as triethyleneglycol or an 18-atom spacer such as hexaethyleneglycol.

[0365] The approach can be applied to any combination of aptamers, in particular those in Table 27.

TABLE 27

| SEQ | | | |
|---|---|---|---|
| ID | | | |
| NO: | Aptamer | Target | Sequence |
| 1 | 285 | VEGF | CXACZCCGCGCGGAGGGXUUUCAUAAUCC |
| | | | CGUUUXUCX |
| 2 | 26 | VEGF | AGGCCGCCUCCGCGCGGAGGGGUUUCAUU |
| | | | AUCCCGUUUGGCGGCUU |
| 3 | 439 | VEGF | CGACUCCGCGCGGAGGGUUGGAGGUUACC |
| | | | CGUUUGUCG |
| 4 | 441 | VEGF | CGACUCCGCGCGGAGUCCCUAAUUUGGGG |
| | | | CGUUUGUCG |
| 5 | 443 | VEGF | CGACUCCGCGCGGAGUCCCUUCAUUGGGG |
| | | | CGUUUGUCG |
| 6 | 445 | VEGF | CGACUCCGCGCGGAGGGUUAAUGGCUACC |
| | | | CGUUUGUCG |
| 7 | 447 | VEGF | CGACUCCGCGCGGAGUCCCUGUAAUGGGG |
| | | | CGUUUGUCG |
| 8 | 479 | VEGF | CGACUCCGCGCGGAGGGUUUGGCUACCCG |
| | | | UUUGUCG |
| 9 | 481 | VEGF | CGACUCCGCGCGGAGGCUUGAGGUAGCCG |
| | | | UUUGUCG |
| 10 | 483 | VEGF | CGACUCCGCGCGGAGUCCCACAUGGGGCG |
| | | | UUUGUCG |
| 11 | 485 | VEGF | CGACUCCGCGCGGAGGGAUGAGGUUCCCG |
| | | | UUUGUCG |
| 12 | 487 | VEGF | CGACUCCGCGCGGAGGCAUGAGGUUGCCG |
| | | | UUUGUCG |
| 13 | 489 | VEGF | CGACUCCGCGCGGAGUGCUGAGGUGCACG |
| | | | UUUGUCG |
| 14 | 600 | VEGF | CGACZCCGCGCGGAGGGUUGGAGGUUACC |
| | | | CGUUUGUCG |
| 15 | 601 | VEGF | CGACZCCGCGCGGAGUCCCUAAUUUGGGG |
| | | | CGUUUGUCG |
| 16 | 602 | VEGF | CGACZCCGCGCGGAGUCCCUUCAUUGGGG |
| | | | CGUUUGUCG |
| 17 | 603 | VEGF | CGACZCCGCGCGGAGGGUUAAUGGCUACC |
| | | | CGUUUGUCG |
| 18 | 604 | VEGF | CGACZCCGCGCGGAGUCCCUGUAAUGGGG |
| | | | CGUUUGUCG |
| 19 | 605 | VEGF | CGACZCCGCGCGGAGGGUUUGGCUACCCG |
| | | | UUUGUCG |
| 20 | 606 | VEGF | CGACZCCGCGCGGAGGCUUGAGGUAGCCG |
| | | | UUUGUCG |
| 21 | 607 | VEGF | CGACZCCGCGCGGAGUCCCACAUGGGGCG |
| | | | UUUGUCG |
| 22 | 608 | VEGF | CGACZCCGCGCGGAGGGAUGAGGUUCCCG |
| | | | UUUGUCG |
| 23 | 609 | VEGF | CGACZCCGCGCGGAGGCAUGAGGUUGCCG |
| | | | UUUGUCG |
| 24 | 610 | VEGF | CGACZCCGCGCGGAGUGCUGAGGUGCACG |
| | | | UUUGUCG |
| 25 | 611 | VEGF | CXACUCCGCGCGGAGGGUUGGAGGUUACC |
| | | | CGUUUXUCX |
| 26 | 612 | VEGF | CXACUCCGCGCGGAGUCCCUAAUUUGGGG |
| | | | CGUUUXUCX |
| 27 | 613 | VEGF | CXACUCCGCGCGGAGUCCCUUCAUUGGGG |
| | | | CGUUUXUCX |
| 28 | 614 | VEGF | CXACUCCGCGCGGAGGGUUAAUGGCUACC |
| | | | CGUUUXUCX |
| 29 | 615 | VEGF | CXACUCCGCGCGGAGUCCCUGUAAUGGGG |
| | | | CGUUUXUCX |
| 30 | 616 | VEGF | CXACUCCGCGCGGAGGGUUUGGCUACCCG |
| | | | UUUXUCX |
| 31 | 617 | VEGF | CXACUCCGCGCGGAGGCUUGAGGUAGCCG |
| | | | UUUXUCX |
| 32 | 618 | VEGF | CXACUCCGCGCGGAGUCCCACAUGGGGCG |
| | | | UUUXUCX |
| 33 | 619 | VEGF | CXACUCCGCGCGGAGGGAUGAGGUUCCCG |
| | | | UUUXUCX |
| 34 | 620 | VEGF | CXACUCCGCGCGGAGGCAUGAGGUUGCCG |
| | | | UUUXUCX |
| 35 | 621 | VEGF | CXACUCCGCGCGGAGUGCUGAGGUGCACG |
| | | | UUUXUCX |
| 36 | 622 | VEGF | CXACZCCGCGCGGAGGGUUGGAGGUUACC |
| | | | CGUUUXUCX |
| 37 | 623 | VEGF | CXACZCCGCGCGGAGUCCCUAAUUUGGGG |
| | | | CGUUUXUCX |
| 38 | 624 | VEGF | CXACZCCGCGCGGAGUCCCUUCAUUGGGG |
| | | | CGUUUXUCX |
| 39 | 625 | VEGF | CXACZCCGCGCGGAGGGUUAAUGGCUACC |
| | | | CGUUUXUCX |
| 40 | 626 | VEGF | CXACZCCGCGCGGAGUCCCUGUAAUGGGG |
| | | | CGUUUXUCX |
| 41 | 627 | VEGF | CXACZCCGCGCGGAGGGUUUGGCUACCCG |
| | | | UUUXUCX |
| 42 | 628 | VEGF | CXACZCCGCGCGGAGGCUUGAGGUAGCCG |
| | | | UUUXUCX |
| 43 | 629 | VEGF | CXACZCCGCGCGGAGUCCCACAUGGGGCG |
| | | | UUUXUCX |
| 44 | 630 | VEGF | CXACZCCGCGCGGAGGGAUGAGGUUCCCG |
| | | | UUUXUCX |
| 45 | 631 | VEGF | CXACZCCGCGCGGAGGCAUGAGGUUGCCG |
| | | | UUUXUCX |
| 46 | 632 | VEGF | CXACZCCGCGCGGAGUGCUGAGGUGCACG |
| | | | UUUXUCX |
| 47 | 248 | IL8 | XCXXUGGGAAAUGUGAGAUGGGUUXCCXC |
| 48 | 269 | IL8 | XXCXACXXUAXAUUAUGGGCAGUGUGACC |
| | | | XCXCC |
| 49 | 188 | Ang2 | XGGCAAAGGCAAAUCAAAACCGUUACAAC |
| | | | CC |
| 50 | 204 | Ang2 | ACGGGGCAAUCCUGCCGUUUUACAGGUAA |
| | | | AXCCG |
| 51 | ARC1905 | C5 | CXCCGCXXUCUCAXXCGCUXAXUCUXAXU |
| | | | UUACCUXCX |
| 52 | ARC127 | PDGF | caggcUaCX(S18)cgtaXaXcaUCA |
| | | | (S18)tgatCCUX |
| 53 | 3(19) | FGF2 | XXXAUACUAXX(rG)CAUUAAUXUUACCA |
| | | | (rG)U(rG)UAXUCCC |
| 54 | 74 | FactorD | CCXCCUUGCCAGUAUUGGCUUAGGCUGGA |
| | | | AGUUUXXCXX |

Where G is 2′F RNA, X is 2′OMe G RNA, A, C, and U are 2′OMe RNA, C and U are 2′F RNA, a, g, c and t are DNA, Z is a 1,3-propanediolspacer and (S18) hexaethyleneglycol

### Example 2: Synthesis of Bispecific Aptamer Compositions Using Aptamer 285Ex and Aptamer 269

[0366] Using this approach, bispecific aptamers were synthesized using aptamer 285ex, an extended version of the anti-VEGF aptamer 285 with an inverted T (SEQ ID NO: 67) combined with the anti-IL8 aptamer 269 with a converted T (SEQ ID NO: 56). Bispecific aptamers were generated using a non-nucleotide linker comprised of a 3-carbon non-nucleotidyl 1,3-propanediol spacer (Z) (SEQ ID NOS: 69 and 398), a non-nucleotide linker comprised of a hexaethylene glycol spacer (S18) (SEQ ID NOS: 70 and 399), or a nucleotide linker composed of five 2′ OMe deoxyuridine residues (5U) (SEQ ID NO: 71). The order of the aptamer domains was varied; constructs were made with aptamer 285 linked to the 5′ side of aptamer 269, and with aptamer 285 linked to the 3′ side of aptamer 269. In all cases, aptamers were generated bearing a 5′ a 3′ inverted deoxy thymidine (Table 28).

TABLE 28

| SEQ | | | | |
|---|---|---|---|---|
| ID | | | | |
| NO | 5′Apt | 3′Apt | Linker | Sequence |
| 67 | 285ex | n/a | n/a | XCCXACZCCGCGCGGAGGGXUUUC |
| | | | | AUAAUCCCGUUUXUCXXC-invdT |
| 56 | 269 | n/a | n/a | XXCXACXXUAXAUUAUGGGCAGUG |
| | | | | UGACCXCXCC-invdT |
| 69 | 285ex | 269 | Z | XCCXACZCCGCGCGGAGGGXUUUC |
| 398 | | | | AUAAUCCCGUUUXUCXXCZXXCXA |
| | | | | CXXUAXAUUAUGGGCAGUGUGACC |
| | | | | XCXCC-invdT |
| 70 | 285ex | 269 | S18 | XCCXACZCCGCGCGGAGGGXUUUC |
| 399 | | | | AUAAUCCCGUUUXUCXXCS18XXC |
| | | | | XACXXUAXAUUAUGGGCAGUGUGA |
| | | | | CCXCXCC-invdT |
| 71 | 285ex | 269 | 5U | XCCXACZCCGCGCGGAGGGXUUUC |
| | | | | AUAAUCCCGUUUXUCXXC-UUUUU- |
| | | | | XXCXACXXUAXAUUAUGGGCAGUG |
| | | | | UGACCXCXCC-invdT |
| 74 | 269 | 285ex | Z | XXCXACXXUAXAUUAUGGGCAGUG |
| 401 | | | | UGACCXCXCCZXCCXACZCCGCGC |
| | | | | GGAGGGXUUUCAUAAUCCCGUUUX |
| | | | | UCXXC-invdT |
| 75 | 269 | 285ex | S18 | XXCXACXXUAXAUUAUGGGCAGUG |
| 402 | | | | UGACCXCXCCS18XCCXACZCCGC |
| | | | | GCGGAGGGXUUUCAUAAUCCCGUU |
| | | | | UXUCXXC-invdT |
| 76 | 269 | 285ex | 5U | XXCXACXXUAXAUUAUGGGCAGUG |
| 403 | | | | UGACCXCXCC-UUUUU-XCCXACZ |
| | | | | CCGCGCGGAGGGXUUUCAUAAUCC |
| | | | | CGUUUXUCXXC-invdT |

where G is 2′F RNA, X is 2′OMe G RNA, A, C, and U are 2′OMe RNA, C and U are 2′ F RNA, a, g, c and t are DNA, Z is a 1,3-propanediol spacer, S18 is hexaethylene glycol
Sequences in bold indicate base pairs added to stabilize a terminal stem

### Example 3: Bispecific Aptamers Targeting VEGF and IL8 Generated By Enzymatic Synthesis

[0367] A bispecific aptamer targeting both VEGF and IL8 can also be generated enzymatically by linking an aptamer domain targeting VEGF and an aptamer domain targeting IL8. To achieve this, the anti-VEGF aptamer (aptamer 26 (SEQ ID NO: 2); AGGCCGCCUCCGCGCGGAGGGGUUUCAUUAUCCCGUUUGGCGGCUU, where A, C and U are 2′OMe, G is 2′F G) is linked at the 5′ end of a short nucleotide linker composed of five 2′OMe Uridine residues (UUUUU; where U is 2′OMe U), which in turn is linked to the 5′ end of the anti-IL8 aptamer (aptamer 269 (SEQ ID NO: 48); GGCGACGGUAGAUUAUGGGCAGUGUGACCGCGCC, where A, C and U are 2′OMe, G is 2′F G, X is 2′OMe G). The resulting bispecific aptamer sequence AGGCCGCCUCCGCGCGGAGGGGUUUCAUUAUCCCGUUUGGCGGCUU UUUUUGGCGACGGUAGAUUAUGGGCAGUGUGACCGCGCC (SEQ ID NO: 446) (where A, C and U are 2′OMe, G is 2′F G) can be encoded in a double stranded DNA immediately adjected to the 3′ end of a dsDNA phage polymerase promoter. Such templates can be generated by PCR from single stranded DNA template using the appropriate primers. The double stranded DNA template can then be transcribed into modified RNA using the appropriate mutant phage polymerase and nucleotide mixture (e.g. 2′F GTP, 2′OMe ATP, 2′OMe CTP, 2′OMe UTP) and purified by gel electrophoresis, HPLC, or other suitable method.

[0368] A number of variations to this approach can be utilized to achieve the same or similar end product. The ordinarily skilled artisan would recognize that the orientation of the domains is not fixed and that the bispecific aptamer could be constructed bearing a 5′ anti-VEGF domain and a 3′ anti-IL8 domain or a 5′ anti-IL8 domain and a 3′ anti-VEGF domain. Similarly, the length of the nucleotide linker or the sequence of the linker changed and that this would impart changes in the distance and or special geometry between the aptamer domains. The approach can be applied to any combination of aptamers, in particular those in Table 27.

### Example 4: Bispecific Aptamers Targeting VEGF and IL8 Generated By Chemical Synthesis Followed By Domain Chemical Conjugation

[0369] An aptamer domain targeting VEGF and an aptamer domain targeting IL8 can be synthesized separately using solid phase chemical synthesis and following deprotection and/or purification linked chemically (FIG. 7).

[0370] To achieve this the anti-VEGF aptamer (aptamer 285 (SEQ ID NO: 1); CXACZCCGCGCGGAGGGXUUUCAUAAUCCCGUUUXUCX, where A, C and U are 2′OMe, G is 2′F G, X is 2′OMe G and Z is the 3-carbon non-nucleotidyl spacer is 1,3-propanediol) is synthesized using a combination of commercially available 2′-fluoro-G and 2′—O-methyl (2′OMe) A/C/U/G modified phosphoramidites on a 3′ inverted deoxythymidine CPG support bearing a 5′ C6 amino modifier to facilitate conjugation. Similarly, the anti-IL8 aptamer (aptamer 269 (SEQ ID NO: 48); XXCXACXXUAXAUUAUGGGCAGUGUGACCXCXCC, where A, C and U are 2′OMe, G is 2′F G, X is 2′OMe G) is synthesized using a combination of commercially available 2′-fluoro-G and 2′—O-methyl (2′OMe) A/C/U/G modified phosphoramidites on a 3′ amine C7 CPG support. The 5′ end of the aptamer is modified with a 5′ C6SS thiol modifier to facilitate conjugation to an activated PEG moiety.

[0371] Following synthesis, the individual aptamers are deprotected using the appropriate solvents and reagents capable of removing the phosphate protecting groups, removing the base protecting groups and cleaving the molecule from the support. For example, the aptamers could be treated with diethylamine in acetonitrile followed by aqueous 30% ammonium hydroxide or a 50/50 mixture of aqueous 30% ammonium hydroxide and 40% methyl ammonium hydroxide. The deprotected aptamers are then desalted prior to subsequent use.

[0372] To link the aptamer domains, the anti-VEGF aptamer bearing a 5′ prime amine is first incubated with a 1.5-5-fold molar excess of the heterobifunctional PEG linker, SM(PEG)24, in sodium bicarbonate buffer at pH 8.5. Following incubation, typically 2-20 hr, the resultant maleimide activated aptamer conjugate is purified by size exclusion chromatography, anion exchange chromatography, or ion paired reverse phase chromatography.

[0373] Subsequently the, anti-IL8 aptamer bearing a 5′ C6SS thiol modifier is reduced following treatment with 100 mM TCEP in 0.1M TEAA by heating at 70C for 5 minutes. The reduced aptamer is then desalted to remove free thiol and reducing agents and incubated 1:1 with the maleimide activated anti-VEGF aptamer conjugate in PBS, pH 7.4. Following incubation, typically 2-20 hr, the resultant aptamer conjugate is purified by size exclusion chromatography, anion exchange chromatography, or ion paired reverse phase chromatography.

[0374] Finally, PEGylation of the 3′ end of the bispecific aptamer is achieved by combining the bispecific aptamer conjugate with a 1.5-5-fold molar excess of NHS activated SUNBRIGHT® GL2-400GS2 in 0.1M sodium bicarbonate buffer at pH 8.5. Following incubation, typically 2-20 hr, the PEGylated bispecific aptamer is then purified by either anion exchange chromatography or ion paired reverse phase chromatography. The PEGylated bispecific aptamer is subsequently desalted prior to future use.

[0375] A number of variations to this approach can be utilized to achieve the same or similar end product. Such approaches might make use of different buffers, solutions or reagents that are well known in the art. Additionally, the order of conjugation and/or the need for or the methods of purification can be varied and/or substituted with a variety of alternatives. Similarly, the orientation of the aptamer (5′ and 3′) as well as the identity and location of the chemical groups (5′ and 3′) employed for conjugation described here (amine and thiol) could be varied or substituted for any number of different linker chemistries (amine, thiol, alkyne, azide, etc.) to achieve a similar end product. This approach could be applied to any combination of aptamers, in particular those in Table 27.

### Example 5: Bispecific Aptamers Targeting VEGF and IL8 By Domain Hybridization

[0376] An aptamer domain targeting VEGF and an aptamer domain targeting IL8 can be synthesized using solid phase chemical synthesis separately and following deprotection and/or purification linked by hybridization (FIGS. 8-9).

[0377] The anti-VEGF aptamer (aptamer 285 (SEQ ID NO: 1); CXACZCCGCGCGGAGGGXUUUCAUAAUCCCGUUUXUCX, where A, C and U are 2′OMe, G is 2′F G, X is 2′OMe G and Z is the 3-carbon non-nucleotidyl spacer is 1,3-propanediol) is linked to the 5′ end of a short hybridization domain, S18-CUCUCUXA (where A, C and U are 2′OMe, X is 2′OMe G and S18 is a hexaethylene glycol non-nucleotidyl spacer) yielding a final sequence, CXACZCCGCGCGGAGGGXUUUCAUAAUCCCGUUUXUCX-S18-CUCUCUXA (SEQ ID NO: 1) where A, C and U are 2′OMe, G is 2′F G, X is 2′OMe G, Z is the 3-carbon non-nucleotidyl spacer is 1,3-propanediol and S18 is a hexaethylene glycol non-nucleotidyl spacer.

[0378] The anti-IL8 aptamer (aptamer 269 (SEQ ID NO: 48); XXCXACXXUAXAUUAUGGGCAGUGUGACCXCXCC, where A, C and U are 2′OMe, G is 2′F G, X is 2′OMe G) is similarly linked to a short complementary hybridization domain, S18-UCAXAXAX (where A, C and U are 2′ OMe, X is 2′OMe G and S18 is a hexaeyhtleneglycol non-nucleotidyl spacer) yielding a final sequence XXCXACXXUAXAUUAUGGGCAGUGUGACCXCXCC-S18-UCAXAXAX (SEQ ID NO: 48), where A, C and U are 2′OMe, G is 2′F G, X is 2′OMe G and S18 is a hexaethylene glycol non-nucleotidyl spacer.

[0379] Chemical synthesis is preformed using a combination of commercially available 2′-fluoro-G and 2′—O-methyl (2′OMe) A/C/U/G modified phosphoramidites and a hexaethylene glycol phosphoramidite on a 3′ inverted deoxythymidine CPG support. To the 5′ end of the anti-IL8 aptamer construct is added a 5′ C6 amino modifier to facilitate PEG conjugation.

[0380] Following synthesis, the individual aptamers are deprotected using the appropriate solvents and reagents capable of removing the phosphate protecting groups, removing the base protecting groups and cleaving the molecule from the support. For example, the aptamers could be treated with diethylamine in acetonitrile followed by aqueous 30% ammonium hydroxide or a mixture of aqueous 30% ammonium hydroxide and 40% methyl ammonium hydroxide. The deprotected aptamers are then purified.

[0381] To link the aptamer domains, the anti-VEGF and anti-IL8 molecules bearing their hybridization tails are incubated in PBS at a ratio of 1:1 and subsequently heated to 70 C for 5 minutes after which they are allowed to cool to room temperature. Following this annealing step, the bispecific aptamer is buffer exchanged into 0.1M borate buffer, pH 8.5 and incubated with a 1.5-5 fold molar excess of NHS activated SUNBRIGHT® GL2-400GS2. Following incubation, typically 2-20 hr, the PEGylated bispecific aptamer is then purified by either anion exchange chromatography or ion paired reverse phase chromatography. The PEGylated bispecific aptamer is subsequently desalted prior to future use.

[0382] A number of variations to this approach can be utilized to achieve the same or similar end product. Such approaches might make use of differ buffers, solutions or reagents that are well known in the art. Additionally, the order of hybridization, PEG conjugation and/or the need for or the methods of purification can be varied and substituted with a variety of alternatives. Similarly, the orientation of the aptamers as well as the identity of the chemical groups employed for conjugation described here (amine and thiol) could be substituted for any number of different linker chemistries (amine, thiol, alkyne, azide, etc.) to achieve a similar end product. Additionally, the length of the linker and the identity of the linker separating the aptamer and the hybridization domain can be varied. For example, the hexaethylene glycol non-nucleotidyl spacer, S18, could be replaced with a shorter 1,3-propanediol non-nucleotidyl spacer. Alternately, the spacer could be composed of nucleotides, for example, by the insertion of a string of 2′OMe uridine residues (e.g. UUUUU; where U is 2′OMe) such that the distance of the aptamer domains can be varied by changing the number of nucleotides.

[0383] The use of a linker composed of nucleotides would allow for individual aptamer domains to be generated by enzymatic synthesis, provided that the selected aptamer domains did not contain any other non-nucleotide linkers and were comprised of nucleotides that are amenable to in vitro transcription. For example, the anti-VEGF aptamer, aptamer 26 (SEQ ID NO: 2), (AGGCCGCCUCCGCGCGGAGGGGUUUCAUUAUCCCGUUUGGCGGCUU) could be linked to the 5′ end of a short complementary hybridization domain, UUUUUUCAGAGAG (SEQ ID NO: 444) (where A, C and U are 2′OMe, G is 2′F G and the linker domain is underlined) yielding a final sequence AGGCCGCCUCCGCGCGGAGGGGUUUCAUUAUCCCGUUUGGCGGCUUUUUUUUCAG AGAG (SEQ ID NO: 445). The sequence could subsequently be encoded in a double stranded DNA immediately adjacent to the 3′ end of a dsDNA phage polymerase promoter and transcribed into modified RNA using the appropriate mutant phage polymerase and nucleotide mixture (e.g.

[0384] 2′F GTP, 2′OMe ATP, 2′OMe CTP, 2′ OMe UTP. Following purification, the modified aptamer could be combined by hybridization with a second aptamer domain (generated by either chemical or enzymatic synthesis) bearing the appropriate complementary hybridization domain. The approach could be applied to any combination of aptamers, in particular those in Table 27.

### Example 6: Determination of Apparent Binding Constants by Competition TR-FRET

[0385] This assay is used to compare IL8 binding affinity of the IL8 component of the bispecific composition with the binding affinity of a monospecific IL8 aptamer with a known binding constant. This assay uses labeled protein (commercially available His-tagged IL-8) and a labeled control compound (an anti-IL8 aptamer) known to bind this protein target and generate a TR-FRET signal. The labeled control compound will be mixed with increasing concentrations of non-labeled test bispecific compounds that will compete for binding. Assays will be performed over a range of 5-7 concentrations to determine the IC₅₀. In short, 5 nM His-tagged IL8 is mixed with 2.5 nM anti-His-Eu conjugate and incubated for 15 minutes. A monospecific anti-IL8 aptamer is synthesized and labeled with ALEXA FLUOR® 647. A mixture of 30 nM of the labeled monospecific aptamer and increasing concentrations of the bispecific compounds ranging from 0 to 3 uM is then added and incubated for 2 hr. plate is read on a Biotek CYTATION™ 5 plate reader. Samples are excited at 330 nm and fluorescent values are collected at 665 nm. Following incubation, the loss of fluorescent signal observed from increasing concentration of the bispecific aptamer will be used to determine the IC₅₀ values for each bispecific construct and compared to a control titration using the unlabeled monospecific anti-IL8 aptamer.

[0386] A similar assay format can be used to compare VEGF binding affinity of the VEGF component of the bispecific composition with the binding affinity of a monospecific VEGF aptamer with a known binding constant.

[0387] This assay uses glycan biotinylated-VEGF165 (VEGF165, biotinylated using aminooxy-biotin following mild oxidation with sodium periodate) and a labeled control compound (an anti-VEGF aptamer) known to bind this protein target and generate a TR-FRET signal. The labeled control compound will be mixed with increasing concentrations of non-labeled test bispecific compounds that will compete for binding. Assays will be performed over a range of 5-7 concentrations to determine the IC₅₀. In short, 1 nM biotinylated VEGF165 is mixed with 0.5 nM steptavidin-Eu conjugate and incubated for 15 minutes. A monospecific anti-VEGF aptamer is synthesized and labeled with ALEXA FLUOR® 647. A mixture of 5 nM of the labeled monospecific aptamer and increasing concentrations of the bispecific compounds ranging from 0 to 1 uM is then added and incubated for 2 hr. The plate is read on a Biotek CYTATION™ 5 plate reader. Samples are excited at 330 nm and fluorescent values are collected at 665 nm. Following incubation, the loss of fluorescent signal observed from increasing concentration of the bispecific aptamer will be used to determine the IC₅₀ values for each bispecific construct and compared to a control titration using the unlabeled monospecific anti-VEGF aptamer.

### Example 7: Determination of Anti-VEGF Activity by Competition ELISA

[0388] This assay is used to evaluate inhibitory activity of the anti-VEGF portion of the bispecific aptamer constructs. They are compared with the inhibitory properties of a monospecific anti-VEGF aptamer with known activity. The assay uses an ELISA to look directly at the ability to interfere with the VEGF-A:KDR interaction.

[0389] Briefly, 10 nM KDR-Fc fusion protein (R&D Systems) in PBS is immobilized on a 96 well plate (Nunc Maxisob) by incubation overnight at 4° C. Following immobilization, the solution is removed, and the plate is blocked with 200 uL of blocking buffer (20 mg/mL BSA in PBST buffer) at room temperature for 2 hours after which the plate is washed again 3× with 200 uL PBST. A mixture containing 300 pM of glycan biotinylated-VEGF165 preincubated with increasing concentrations of test compound ranging from 0 to 50 nM, is then added to each well. Following an additional 2 hr incubation the plates are washed 3+ with PBST and then incubated with 50 uL of 1:5000 diluted streptavidin-HRP (horse radish peroxidase) in PBST for 1 hr at room temperature. The amount of biotinylated-VEGF165 bound to the plate, and thus degree of inhibition, is determined using 100 uL TMB ultra followed by 100 uL 2N sulfuric acid and the percent inhibition for each construct was calculated by the following formula:

% inhibition=1−(sample−low control)/(high control−low control)*100

The values are fit by using a four-parameter non-linear fit in GraphPad Prism Version 7.0.

### Example 8: Characterization of Inhibition of VEGF-A Signal Transduction by KDR Phosphorylation AlphaLisa®

[0390] When the receptor binding domain (RBD) of VEGF-A binds to its receptor KDR, the receptor dimerizes leading to trans-autophosphorylation and activation of VEGF-A signaling. To determine if bispecific aptamers can inhibit VEGF-A activity on cells, bispecific aptamers can be tested for the ability to inhibit KDR phosphorylation induced by either VEGF-A₁₆₅ or VEGF-A₁₂₁ and compared to the activity of a monospecific anti-VEGF with known activity, or to anti-VEGF-A antibody.

[0391] Briefly, HEK293 cells engineered to stably overexpress KDR are plated overnight on collagen coated 96 well plates at 50 k cells/well. Aptamers in SB1+(40 mM HEPES, pH 7.5, 125 mM NaCl, 5 mM KCl, 1 mM MgCl2) are heated to 90° C. for 3 minutes and allowed to cool to room temperature for a minimum of 10 minutes. VEGF-A₁₂₁ (Biolegend) and VEGF-A₁₆₅ (R&D Systems) are prepared at 12.5 nM in DMEM+0.8% FBS, a 20× stock for the reaction. 15 μL of VEGF-A is added to 15 μL titrated aptamer in a polypropylene plate and diluted to 300 μL with TS buffer (10 mM Tris pH 7.5; 100 mM NaCl; 5.7 mM KCl; 1 mM MgCl2; 1 mM CaCl₂)). The aptamer/VEGF-A mixture is incubated at 37° C. for 30 minutes, after which 100 μL is added to the cells for 5 minutes at 37° C. in 5% CO₂. The treatment is aspirated from cells, and the cells lysed with 100 μL cold lysis buffer [20 mM Tris-HCl, pH 7.5, 150 mM NaCl, 1 mM EDTA, 1% Triton X-100, 0.5 mM sodium orthovanadate (freshly prepared), 1 mM PMSF (freshly prepared), 1× protease inhibitor cocktail (freshly prepared)] on ice for 10 minutes. The plates are centrifuged at 4000×g for 10 minutes before transferring the cell lysis to the AlphaLISA® assay plate for analysis.

[0392] To perform the AlphaLISA® assay, 10 μL of cell lysis is transferred to a white low volume 384 well Optiplate (Perkin Elmer). A mixture of the following components is made in order of which they are listed: 1.25 nM anti-hVEGFR2 polyclonal goat IgG antibody (R&D Systems), 10 μg/ml AlphaLISA® anti-goat IgG acceptor beads (Perkin Elmer), 1.25 nM P-tyrosine biotinylated mouse mAb (Cell Signaling Technology), and 10 μg/ml AlphaScreen® streptavidin donor beads (Perkin Elmer). 10 μL of this reagent mixture is added to the assay plate that contains 10 μL of cell lysate. The assay plate is sealed and incubated in the dark for approximately 2 hours, and is then read on a Biotek CYTATION™ 5 plate reader using the Alpha 384 well optical cube. Percent inhibition is calculated by subtracting TS buffer background from each value and normalizing to VEGF-A only controls. The values can be fit by using a four-parameter non-linear fit in GraphPad Prism Version 7.0.

### Example 9: Inhibition of IL8-Mediated Neutrophil Migration

[0393] This assay is used to evaluate the ability of the anti-IL8 portion of the bispecific aptamers to block the interaction between IL8 and its cognate receptors, CXCR1/CXCR2 thereby blocking the recruitment of neutrophils, induced by IL8. The assay makes use of a Boyden chamber in which neutrophils are placed in the top chamber and IL8, along with an increasing concentration of bispecific aptamer are added to the bottom chamber. A monospecific anti-IL8 aptamer with known activity is used as a comparator.

[0394] Briefly, freshly isolated primary human neutrophils are isolated from fresh whole human blood using Polymorphprep™ (AXIS Shield) and then resuspended in assay buffer (RPMI+0.1% Human Serum Albumin) at 10 6 cells/mL. 5 μm Transwell inserts (Corning) are activated with 200 μL assay buffer in the plate and 100 μL of assay buffer in the top chamber of the transwell at 37° C. 3 nM IL8 and increasing concentrations of bispecific aptamers or (0-1 μM) or monospecifc aptamer control are incubated for 1 hour and then 200 μL of this aptamer/IL8 mix is added to each well. Neutrophils in 100 μL of assay buffer are added to the top chamber of the transwell. After 45 minutes at 37° C., 100 μL from each well is transferred to a white 96-well plate with 50 μL of lysis buffer. The number of cells that migrate from the top chamber to the bottom well is quantified using the ATPLITE® Luminescence Assay System (Perkin Elmer). IC₅₀ values can be determined by a best fit of the data using GraphPad Prism Version 7.0.

### Example 10: Inhibition of Endothelial Permeability

[0395] This assay assesses the ability of bispecific aptamers to inhibit the effects of VEGF and IL8 on endothelial cell permeability. The assay makes use of a Boyden chamber in which cells (HUVEC or RMEC) are placed in the top chamber and allowed to form a confluent monolayer as determined by restricted dye leakage, horseradish peroxidase (HRP) leakage or transendothelial electrical resistance (TEER). To the transwell is added VEGF, IL8 or a mixture of these proteins. These proteins increase endothelial permeability which can be measured by diffusion of HRP which can be added to the insert. A model for the experiment is described in (Human Reproduction, Volume 25, Issue 3, March 2010, Pages 757-767).

[0396] An initial titration experiment is performed using VEGF and IL8 to identify minimal protein concentrations required to induce permeability following a 1 hr incubation as determined by leakage of HRP across the cell layer. The inhibitory effects of our test compounds can then be assessed in this system using the concentrations specified from these control titrations. A monospecific anti-IL8 aptamer, or anti-VEGF aptamer with known activity is used as a comparator.

[0397] In short, a mixture of IL8 and VEGF at concentrations sufficient to induce permeability following a 1 hr incubation is incubated with increasing concentrations of bispecific aptamer, monospecific anti-IL8 aptamer, or anti-VEGF aptamers at 5 to 8 concentrations ranging from 0 to 1 μM. The mixture is preincubated for 1 hr at 37° C. and then added to a confluent monolayer of cells along with HRP (Type VI-A, 44 kDa; Sigma-Aldrich) at a concentration of 0.126 μM. After an additional 1 hr incubation the medium in the lower well is collected and assayed for HRP enzymatic activity using a photometric guaiacol substrate assay (Sigma-Aldrich). The detection reaction is allowed to proceed for 15 min at room temperature, and absorbance is measured at 450 nm.

### Example 11: Bispecific Composition in a Rabbit Model of Chronic Retinal Neovascularization

[0398] Here we describe in detail a model of sustained retinal neovascularization (RNV) and leakage, the DL-a-aminoadipic acid (AAA) model in rabbits. This is a model that measures a compounds ability to inhibit pathologic leakage. In brief, rabbits receive a single IVT injection of AAA, with weekly follow-up fundus photography, fluorescein angiography (FA), and optical coherence tomography (OCT). After 10 weeks, they receive a single IVT bispecific composition or control injection. RNV leakage is quantified from FA by image analysis with Photoshop. Some eyes are collected for histologic analysis.

[0399] This model mimics a chronic human disease in its stability and persistence, and the antileak action of the bispecific composition should be fully reversible with a dose-dependent duration. Therefore, this large eye model is uniquely suitable for investigations into the efficacy and duration of action of novel formulations and pharmacotherapies for retinal vascular diseases, and for studying the underlying pathobiology of retinal angiogenesis.

Male New Zealand White (NZW) rabbits with a mean age of 8 to 10 weeks and weight range of 2 to 2.5 kg are utilized for the model. All animal experiments will conform with the Association for Research in Vision and Ophthalmology (ARVO) Statement for the Use of Animals in Ophthalmic and Vision Research.

[0400] To prepare a AAA solution, 120 mg amount of AAA is dissolved in 1 mL hydrochloric acid [1 N]. The AAA stock solution is then diluted to an 80 mM solution using 0.9% sterile normal saline solution which is followed by adjusting the pH of the solution to 7.4. The final solution is then passed through a disposable Millex-GP syringe filter unit with a pore size of 0.22 lm to remove any potential particulates. Solutions should be made immediately before use and all solutions should remain at room temperature until time of injection.

[0401] Initial baseline in-life ophthalmic evaluations are performed before induction of RNV. Rabbits are anesthetized with ketamine (35 mg/kg, intramuscular) and Xylazine (5 mg/kg, intramuscular). Heart rate, respiratory rate, mucus membrane color, body temperature, and pulse oximetry are monitored every 15 minutes for the entire duration of anesthesia in each animal. Corneas are anesthetized further using a 0.5% ophthalmic solution of proparacaine hydrochloride. Pupils are dilated using a 1% ophthalmic solution of tropicamide. An additional drop of a GenTeal lubricating eye gel is applied to the eye to help with corneal hydration. A juvenile ophthalmic speculum then is used to open the eyelids for intraocular imaging.

[0402] Ophthalmic evaluations include a photograph of the eye using a Canon PowerShot digital camera for assessment of gross inflammation and an intra-ocular pressure (TOP) measurement using a Tono-Pen is taken before pupil dilation. Approximately 5 minutes after pupil dilation, fundus examination using a WelchAllyn PanOptic Ophthalmoscope, Red-free Imaging using a Spectralis Heidelberg retinal angiography platform HRAbOCT system, early (0-3 minutes) and late (10-13 minutes) phase fluorescein angiography (FA) using the Spectralis imaging system, and multiple 61-scan P-Pole optical coherence tomography (OCT) imaging using the Spectralis system are performed for each eye.

[0403] Following initial baseline in-life ophthalmic evaluations, male NZW rabbits receive an 80 μL IVT injection of an 80 mM AAA solution (described earlier) with an injection site at 10 o'clock for the right eye (OD) and 2 o'clock for the left eye (OS). After 10 minutes, a second IOP measurement is obtained to assess acute pressure changes due to injection volume. An additional ophthalmoscope observation is used to identify any potential damage during injection. A 0.5% Erythromycin Ophthalmic Ointment is applied to the eye immediately after observation.

[0404] Animals receive follow-up examinations, similar to what is performed at baseline, between and 65 weeks after AAA injection, which are used to assess disease progression. Any eyes with severe retinal detachment, either procedure-related or due to serious retinal damage, or absence of vascular leakage (10%-20%) are excluded from the studies.

[0405] To quantify disease progression at baseline prior to treatment, NZW rabbits receive two IVT injections of BrdU at 10 mcg/50 mcl, on days 28 and 32, after DL-AAA. At week 10, rabbits are euthanized and perfused with fluorescein ConA diluted in 1% paraformaldehyde and eyecups are fixed further overnight in 1% PFA at 48C. Following fixation, retinas are dissected, permeabilized, and blocked overnight at 37° C. in PBS containing 0.5% BSA, 0.1% Triton X-100, and normal goat serum. The following day, retinas are washed in PBS containing Triton X-100 and are incubated in 2N HCl for 1 hour at room temperature, washed again in PBS, and incubated overnight at 37° C. in mouse anti-BrdU. Following incubation with primary antibody, retinas are washed again and incubated with goat anti-mouse Alexa 647 for 3 hours at 37° C. and mounted with ProLong antifade.

[0406] For treatment and control animals, on week 10, after AAA administration, when retinal neovascular leakage is stabilized, a therapeutic baseline ophthalmic examination is performed similar to examinations described previously. Rabbits are divided into treatment or control groups, and the anesthetized animals are prepared for IVT treatment immediately following examination. An intravitreal (IVT) bispecific composition is given at a range of doses. Control groups receive either buffer or human Fc. All IVT injections will have a volume of 50 μL regardless of the dose of the bispecific composition. A second IOP measurement is taken 10 minutes after the treatment injections. A 0.5% Erythromycin Ophthalmic Ointment is applied to the eye immediately after the second IOP measurement. In a separate cohort, on week 10 after AAA induction, repeat IVT doses of the bispecific composition can be given with the subsequent dose given following a full recurrence of pathologic leakage.

[0407] Further follow-up ophthalmic examinations are performed at weeks 1 through 20 after bispecific composition injections. Red-free images and early-phase FA images are exported from the Heidelberg software and imported to Adobe Photoshop CC. Multiple images per eye are overlaid and merged into a mosaic of the fundus. For FA images, leakage area is quantified by tracing over the fluorescein cloud in the vitreous using a paintbrush tool and calculating the number of pixels covered. Leakage area is standardized weekly using the area of the optic nerve head. Data is recorded as the percent leakage area when compared to baseline leakage area before any treatment with the bispecific composition.

At each time point, percent leakage area is compared among treatments using 1-factor ANOVAs with a Tukey's multiple comparison test. All analyses are performed using GraphPad Prism. Data are shown as mean values +/− SEM, unless stated otherwise. A P value of less than 0.05 is considered statistically significant.

[0408] Vitreous is isolated and centrifuged for 10 minutes at 10,000 g from normal and DL-AAA treated eyes with already established disease. The upper phase is collected, aliquoted, and stored at −80° C. until VEGF levels are assessed. VEGF levels are measured using a Milliplex Assay from Millipore following manufacturer's instructions.

[0409] Eyes are enucleated and placed in either 10% formalin or Davidson's fixative for 48 hours. Following fixation, right eyes are dissected and placed in 70% ethanol until processed for paraffin embedding. Serial sections from each eye are then stained with hematoxylin and eosin. Left eyes processed for immunostaining are embedded in OCT Tissue-Tek, sectioned, and stored at −80° C. Before washing the OCT with PBS, the eyes are placed in a 50% to 60° C. oven for 15 minutes. Following removal of OCT, the tissue is permeabilized with 0.1% Triton X-100 (Thermo Fisher Scientific) for 15 minutes and blocked with PBS+1% BSA+0.1% TritonX+5% normal goat serum for 1 hour. Mouse anti-B-Tubulin Alexa488 is added at 1:200 in blocking buffer and sections are incubated at 48° C. overnight. The following day, sections are washed with PBS and mounted with ProLong Gold Antifade. Images are acquired in a Nikon 80i Eclipse Microscope.

### Example 12: Evaluate Efficacy of Bispecific Composition Using a Pig Laser CNV Model

[0410] Due to the similar eye size and retinal anatomy to humans, pigs have become the favored model animal for assessing test drug efficacy in posterior segment proliferative disease. While rabbits are commonly used in many ophthalmic studies, their retinal architecture differs significantly from those of humans, making the use of pigs an excellent alternative. To this end we will assess efficacy in a laser CVN model in pigs.

[0411] In more detail, on day 0, a topical mydriatic (1.0% tropicamide HCL) will be applied at least 15 minutes prior to the laser procedure to each animal. The pigs will receive 0.01-0.03 mg/kg buprenorphine intramuscularly (IM) and will be anesthetized with ketamine/dexmedetomidine IM (1 mg and 0.015 mg per kg body weight, I.M., respectively). A wire eyelid speculum is placed, and the cornea kept moistened using topical eyewash. An 810 nm diode laser delivered through an indirect ophthalmoscope will be used to create approximately 6 single laser spots between retinal veins. While sedated, pigs will also be injected with test compounds. The conjunctiva will be gently grasped with colibri forceps, and the injection (27-30 G needle) made 2-3 mm posterior to the superior limbus (through the pars plana) will be done with the needle directly slightly posteriorly to avoid contact with the lens. The injection will be made, and the needle slowly withdrawn. Following the injection procedure, 1 drop of antibiotic ophthalmic solution will be applied topically to the ocular surface.

[0412] Mydriasis for ocular examination will be done using topical 1% tropicamide HCL (one drop in each eye 15 minutes prior to examination). Complete ocular examination (modified Hackett and McDonald) using a slit lamp biomicroscope and indirect ophthalmoscope will be used to evaluate ocular surface morphology, anterior segment and posterior segment inflammation, cataract formation, and retinal changes will be conducted on days 7 and 14 post treatment.

[0413] Fluorescein angiography (FA) will be conducted on days 7 and 14 post treatment on anesthetized animals [ketamine/dexmedetomidine (IM)]. Mydriasis for FA will be done using topical 1% Tropicamide HCL (one drop in each eye 15 minutes prior to examination). Full FA will be performed 1-3 minutes after intravenous sodium fluorescein injection (12 mg kg-1). A trained reader will analyze the masked images obtained. Area of maximal fluorescein leakage will be measured using Image J for each lesion.

[0414] Terminal collections (aqueous humor, vitreous humor, retina and plasma) will be performed at the end of the experiment to provide material for PK/PD analyses.

### Example 13 Evaluate Efficacy of Bispecific Composition in Non-Human Primates Using the DL-α-Aminoadipic Acid (dlAAA) Chronic Vascular Leak Model

[0415] Testing in non-human primate disease models is the gold standard for demonstrating efficacy, most strongly supporting successful translation to humans. To this end, we will assess the efficacy of a bispecific composition in a DL-α-aminoadipic acid (dlAAA) chronic vascular leak model in green monkeys (Chlorocebus sabaeus) or cynomolgous monkeys.

[0416] On day 0 all enrolled monkeys will receive IVT injections of 5 mg DLAAA in both eyes. DLAAA is dissolved in 1M hydrochloric acid to generate a 100 mg/mL stock solution, which is then diluted with phosphate buffered saline, pH adjusted to 7.4 and is filtered through a 0.2-micron filter. Aliquots of DLAAA dose solutions (25 mg/mL) are prepared before the day of dosing and stored at −80° C. At the time of IVT dosing the required amount of frozen DLAAA solution aliquots is removed from the freezer and is thawed to room temperature prior to loading into dosing syringes. All aliquots are prepared from a single batch of DLAAA. Prior to IVT dosing, topical 1% atropine is applied to each eye to achieve full pupil dilation. The ocular surface is anesthetized with 1-2 drops of 0.5% proparacaine and is prepared aseptically with 5% Betadine followed by sterile 0.9% saline. A vitreous tap is performed with a 1 mL syringe attached to a 27-gauge needle to remove 100 μL of vitreous humor, which will then be stored at −80° C. Vitreous taps are performed prior to DLAAA dosing to limit intraocular pressure elevation. DLAAA solution (5 mg/200 μL) is delivered to the mid-vitreous 3 mm posterior to the limbus in the inferior temporal quadrant using 0.3 cc insulin syringes with a 31G 0.5-inch needle. Injections are immediately followed by topical administration of triple antibiotic ointment and 1% atropine ointment.

[0417] Following ophthalmic examinations at weeks 8 or 9 following DLAAA treatment, fluorescein angiography (FA) images are graded by a masked assessor to evaluate severity of DLAAA-induced retinal neovascular leakage, referencing a standard leakage scoring scale. Animals are stratified based on cumulative scores in both eyes and assigned to treatment groups to achieve balanced severity of baseline DLAAA-induced pathology. FA imaging is repeated at week 10 prior to treatments to confirm animal assignments and capture baseline FA images. Prior to bispecific IVT dosing the ocular surface is anesthetized with 1-2 drops of 0.5% proparacaine and prepared aseptically with 5% Betadine followed by sterile 0.9% saline. Bispecific composition treatments are delivered IVT to monkeys using sterile 0.3 mL insulin syringes pre-fitted with 31G needles. The needle is placed 2 mm posterior to the limbus in the inferior temporal quadrant, targeting the central vitreous. Eyes will receive a single IVT injection of either vehicle (0.9% saline, 50 μL) or aflibercept (35 μL of 40 mg/mL solution; Eylea®, Regeneron, Tarrytown, NY) or the bispecific composition. Dose levels of test agents are selected based on relative vitreous volume of African Green monkeys (approximately 2.7 mL) and comparative human vitreous volume of 4.4 mL. All contralateral eyes will receive identical treatment. Injections are followed by topical administration of neomycin/polymyxin B sulfates/bacitracin antibiotic ointment. Dosing is conducted over 2 days and follow-up examination schedules will be maintained for the duration of the study.

[0418] Eyes are examined by slit lamp biomicroscopy at baseline, biweekly after DLAAA administration and weekly after intervention until study terminus to confirm integrity of the ocular surface, general ocular health, broad ocular response to DLAAA administration and normal response to mydriatics and 1% cyclopentolate HCl. Ophthalmic findings are graded using a modified version of the Hackett-McDonald scoring system.

[0419] Bilateral color fundus images of the retina will be obtained at baseline, biweekly after DLAAA administration and weekly after intervention until study terminus with 50° field of view centered on the fovea using a Topcon TRC-50EX retinal camera with Canon 6D digital imaging hardware and New Vision Fundus Image Analysis System software.

[0420] Fluorescence angiograms (FA) are acquired using either a Topcon TRC-50EX retinal camera or a Heidelberg HRA+OCT with high resolution acquisition at fixed gain and flash intensity following intravenous injection of 0.1 mL/kg of 10% sodium fluorescein. Images will be collected up to 6 minutes after fluorescein administration. The retinal area exhibiting vascular leakage in the full series of angiograms will be assessed and scored using a graded scoring system, and the total fluorescence intensity within the leaking area in the 1-minute raw angiograms will be quantified using a semi-automated multi ROI tool in ImageJ (week 10 to study terminus).

[0421] Following treatment, animals will be imaged weekly. Terminal collections (aqueous humor, vitreous humor, retina and plasma) will be performed at the end of week 20 to provide material for PK/PD analyses.

### Example 14: Evaluate Efficacy of Bispecific Composition in Non-Human Primates (NHP) Using a Laser CNV Model

[0422] The efficacy of bispecific aptamers can also be evaluated in NHP using a laser CNV model. Briefly, animals are anesthetized for all procedures with intramuscular injection of 5:1 ketamine:xylazine mix (0.2 mL/kg of 100 mg/mL ketamine and 20 mg/mL xylazine). On day 0, laser photocoagulation will be conducted in all animals. Six laser spots will be symmetrically placed within the perimacular region, approximately 1 to 1.5 optic disc distance from the fovea in each eye by an ophthalmologist employing an Iridex Oculight TX 532 nm laser with a laser duration of 100 ms, spot size 50 μm, power 750 mW. Color fundus photography will be performed immediately after the laser treatment to document the laser lesions. Any spots demonstrating severe retinal/subretinal hemorrhage immediately post-laser and not resolving by the time of follow-up examinations will be excluded from analyses. If hemorrhage occurs encompassing all target lesion areas within the central retina, then the animal will be substituted for with another screened monkey, up to four monkeys across all treatment groups, taking measures to assure balanced assignment to treatment. To accommodate the time necessary for follow-up imaging, monkeys may be divided into two cohorts for laser-induction of CNV, dosing and imaging on successive days, with animals from each treatment group distributed evenly across each cohort.

[0423] All animals will undergo OCT imaging at Day 9 post-laser. CNV complex area for each laser lesion will be measured from the OCT images and a mean size of lesions in each animal will be calculated. Animals will then be assigned to treatment groups based on the mean per animal lesion grade with groups additionally balanced by sex (1:1 per treatment arm) to achieve approximately equivalent mean lesion grade across treatment groups.

[0424] Test article delivery (IVT injection) will be performed on day 11 for all groups in both eyes (OU), according to the treatment assignments. An eye speculum will be placed in the eye to facilitate injections followed by a drop of proparacaine hydrochloride 0.5% and then 5% Betadine solution, and a rinse with sterile saline. IVT injections to the central vitreous will be administered using a 31-gauge 0.375-inch needle inserted inferotemporally at the level of the ora serrata ˜2.5 mm posterior to the limbus. Following both IVT injections, a topical triple antibiotic neomycin, polymyxin, bacitracin ophthalmic ointment (or equivalent) will be administered.

[0425] At designated time points Intraocular pressure (TOP) measurements will be collected using a TonoVet (iCare, Finland) tonometer set to the dog (d) calibration setting. The animal will be placed in a supine position for the measurement. Three measures will be taken from each eye at each time point and the mean TOP defined.

[0426] At designated time points intraocular inflammation will be examined with slit lamp biomicroscopy. Scoring will be applied to qualitative clinical ophthalmic findings using a nonhuman primate ophthalmic exam scoring system with a summary clinical score derived from exam components.

[0427] At designated time points bilateral color fundus images will be captured centered on the fovea using a Topcon TRC-50EX retinal camera with Canon 6D digital imaging hardware and New Vision Fundus Image Analysis System software. Fluorescein angiography (FA) will be performed with intravenous administration of 0.1 mL/kg of 10% sodium fluorescein and images will be taken continuously from 30 seconds to 6 minutes. OD FA precedes OS angiography by greater than 2 hours to allow washout of the fluorescein between angiogram image series. Fluorescein leakage in angiograms of CNV lesions will be graded assessing composites generated after uniform adjustment of image intensity. Image fluorescence densitometry analysis of late-stage raw angiograms will also be performed using ImageJ software.

[0428] At designated time points OCT will be performed using a Heidelberg Spectralis OCT Plus with eye tracking and HEYEX image capture and analysis software. An overall volume scan of encompassing the posterior retina will be performed. At baseline examination, the retinal cross-sectional display image will be obtained. At post-laser examinations, six star-shaped scans per eye, centered on each lesion, will be performed, as well as an overall volume scan of the entire macula encompassing the six laser spots at a dense scan interval. The principal axis of maximal CNV complex formation within each star-shaped scan at each laser lesion will be defined and the CNV complex area measured using the freehand tool within ImageJ to delineate the CNV complex boundary and calculate maximum complex area in square microns (um2).

[0429] Terminal collections (aqueous humor, vitreous humor, retina and plasma) will be performed at the termination of the study to provide material for PK/PD analyses.

1-92. (canceled)

93. A bispecific ribonucleic acid (RNA) aptamer is disclosed comprising Formula I:
X₁-(aptamer1)-X₂-(linker)-Y₁-(aptamer2)-Y₂-invdT Formula I
wherein aptamer 1 is selected from the group consisting of SEQ ID. Nos.: 1-46 and 67 or at least one nucleotide sequence having at least about 70% identify thereto and wherein aptamer 2 is selected from the group consisting of SEQ ID. Nos: 47-48 or at least one nucleotide sequence having at least about 70% identify thereto, wherein the order of aptamer 1 and aptamer 2 can be varied.

94. The bispecific RNA aptamer of claim 93, wherein the linker is a nucleotide linker comprising five or more 2′ O-methyl (2′OMe) uridine (U) residues.

95. The bispecific RNA aptamer of claim 94, wherein the linker is a non-nucleotide linker selected from the group consisting of 1,3-propanediol, 1,6 hexanediol, 1,12 dodecyldiol, triethylene glycol and hexaethylene glycol.

96. The bispecific RNA aptamer of claim 94, wherein one or more nucleotides of the bispecific RNA aptamer are chemically modified.

97. The bispecific RNA aptamer of claim 96, wherein the one or more chemically modified nucleotides are selected from the group consisting of 2′Fluoro (2′F) Guanosine, 2′ OMe Guanosine, 2′OMe Adenosine, 2′OMe Cytosine, 2′OMe Uridine and combinations thereof.

98. The bispecific RNA aptamer of claim 93, wherein the bispecific RNA aptamer specifically binds to Vascular Endothelial Growth Factor (VEGF) or an isoform thereof and Interleukin 8 (IL8).

99. The bispecific RNA aptamer of claim 98, wherein the bispecific RNA aptamer inhibits the function of VEGF or an isoform thereof and IL8 by an amount between about 90% and about 100%.

100. The bispecific RNA aptamer of claim 93, wherein the bispecific RNA aptamer is attached directly to polyethylene glycol (PEG).

101. The bispecific RNA aptamer of claim 100, wherein the bispecific RNA aptamer has a hydrodynamic radius greater than about 10 nm.

102. A pharmaceutical composition comprising the bispecific RNA aptamer of claim 93 and a pharmaceutically acceptable carrier.

103. The pharmaceutical composition of claim 102, formulated for intravitreal administration.

104. A method of treating retinal disease or disorder comprising administering an effective amount of the bispecific RNA aptamer of claim 93 to a subject in need thereof, thereby treating the retinal disease or disorder.

105. The method of claim 104, wherein the retinal disease or disorder is selected from the group consisting of the wet form of age-related macular degeneration (wAMD), diabetic retinopathy, diabetic macular edema, retinal vein occlusion, retinopathy of prematurity and radiation retinopathy.

106. The method of claim 104, wherein the subject in need thereof has been previously treated with one or more anti-VEGF agents, but where the subject has shown a suboptimal response to such treatment.

107. The method of claim 104, wherein the administering comprises intravitreal injection.

108. A method of treating retinal disease or disorder comprising administering an effective amount of the pharmaceutical composition of claim 102 to a subject in need thereof, thereby treating the retinal disease or disorder.

109. The method of claim 108, wherein the retinal disease or disorder is selected from the group consisting of the wet form of age-related macular degeneration (wAMD), diabetic retinopathy, diabetic macular edema, retinal vein occlusion, retinopathy of prematurity and radiation retinopathy.

110. The method of claim 108, wherein the subject in need thereof has been previously treated with one or more anti-VEGF agents, but where the subject has shown a suboptimal response to such treatment.

111. The method of claim 108, wherein the administering comprises intravitreal injection.

The application's sequence listing, which the Patent Office published only in electronic form, follows.

SEQUENCE LISTING (446 sequences)

SEQ ID NO: 1 - RNA, 33 nt, Artificial Sequence
  Aptamer
  misc_feature (1)..(1): The 2'O-Methyl cytosine is attached  through the linker 1,3-propanediolspacer to 2'O-Methyl cytosine of another nucleotide sequence CXAC
  modified_base (1)..(2): 2'O-Methyl Cytosine
  modified_base (3)..(3): 2' Fluoro Guanosine
  modified_base (4)..(4): 2'O-Methyl Cytosine
  modified_base (5)..(5): 2' Fluoro Guanosine
  modified_base (6)..(6): 2'O-Methyl Cytosine
  modified_base (7)..(8): 2' Fluoro Guanosine
  modified_base (9)..(9): 2'O-Methyl Adenosine
  modified_base (10)..(12): 2' Fluoro Guanosine
  modified_base (13)..(13): gm
  modified_base (14)..(16): um
  modified_base (17)..(17): 2'O-Methyl Cytosine
  modified_base (18)..(18): 2'O-Methyl Adenosine
  modified_base (19)..(19): um
  modified_base (20)..(21): 2'O-Methyl Adenosine
  modified_base (22)..(22): um
  modified_base (23)..(25): 2'O-Methyl Cytosine
  modified_base (26)..(26): 2' Fluoro Guanosine
  modified_base (27)..(29): um
  modified_base (30)..(30): gm
  modified_base (31)..(31): um
  modified_base (32)..(32): 2'O-Methyl Cytosine
  modified_base (33)..(33): gm
ccgcgcggagggguuucauaaucccguuugucg

SEQ ID NO: 2 - RNA, 46 nt, Artificial Sequence
  Aptamer
  modified_base (1)..(1): 2'O-Methyl Adenosine
  modified_base (2)..(3): 2' Fluoro Guanosine
  modified_base (4)..(5): 2'O-Methyl Cytosine
  modified_base (6)..(6): 2' Fluoro Guanosine
  modified_base (7)..(8): 2'O-Methyl Cytosine
  modified_base (9)..(9): um
  modified_base (10)..(11): 2'O-Methyl Cytosine
  modified_base (12)..(12): 2' Fluoro Guanosine
  modified_base (13)..(13): 2'O-Methyl Cytosine
  modified_base (14)..(14): 2' Fluoro Guanosine
  modified_base (15)..(15): 2'O-Methyl Cytosine
  modified_base (16)..(17): 2' Fluoro Guanosine
  modified_base (18)..(18): 2'O-Methyl Adenosine
  modified_base (19)..(22): 2' Fluoro Guanosine
  modified_base (23)..(25): um
  modified_base (26)..(26): 2'O-Methyl Cytosine
  modified_base (27)..(27): 2'O-Methyl Adenosine
  modified_base (28)..(29): um
  modified_base (30)..(30): 2'O-Methyl Adenosine
  modified_base (31)..(31): um
  modified_base (32)..(34): 2'O-Methyl Cytosine
  modified_base (35)..(35): 2' Fluoro Guanosine
  modified_base (36)..(38): um
  modified_base (39)..(40): 2' Fluoro Guanosine
  modified_base (41)..(41): 2'O-Methyl Cytosine
  modified_base (42)..(43): 2' Fluoro Guanosine
  modified_base (44)..(44): 2'O-Methyl Cytosine
  modified_base (45)..(46): um
aggccgccuccgcgcggagggguuucauuaucccguuuggcggcuu

SEQ ID NO: 3 - RNA, 38 nt, Artificial Sequence
  Aptamer
  modified_base (1)..(1): 2'O-Methyl Cytosine
  modified_base (2)..(2): 2' Fluoro Guanosine
  modified_base (3)..(3): 2'O-Methyl Adenosine
  modified_base (4)..(4): 2'O-Methyl Cytosine
  modified_base (5)..(5): um
  modified_base (6)..(7): 2'O-Methyl Cytosine
  modified_base (8)..(8): 2' Fluoro Guanosine
  modified_base (9)..(9): 2'O-Methyl Cytosine
  modified_base (10)..(10): 2' Fluoro Guanosine
  modified_base (11)..(11): 2'O-Methyl Cytosine
  modified_base (12)..(13): 2' Fluoro Guanosine
  modified_base (14)..(14): 2'O-Methyl Adenosine
  modified_base (15)..(17): 2' Fluoro Guanosine
  modified_base (18)..(19): um
  modified_base (20)..(21): 2' Fluoro Guanosine
  modified_base (22)..(22): 2'O-Methyl Adenosine
  modified_base (23)..(24): 2' Fluoro Guanosine
  modified_base (25)..(26): um
  modified_base (27)..(27): 2'O-Methyl Adenosine
  modified_base (28)..(30): 2'O-Methyl Cytosine
  modified_base (31)..(31): 2' Fluoro Guanosine
  modified_base (32)..(34): um
  modified_base (35)..(35): 2' Fluoro Guanosine
  modified_base (36)..(36): um
  modified_base (37)..(37): 2'O-Methyl Cytosine
  modified_base (38)..(38): 2' Fluoro Guanosine
cgacuccgcgcggaggguuggagguuacccguuugucg

SEQ ID NO: 4 - RNA, 38 nt, Artificial Sequence
  Aptamer
  modified_base (1)..(1): 2'O-Methyl Cytosine
  modified_base (2)..(2): 2' Fluoro Guanosine
  modified_base (3)..(3): 2'O-Methyl Adenosine
  modified_base (4)..(4): 2'O-Methyl Cytosine
  modified_base (5)..(5): um
  modified_base (6)..(7): 2'O-Methyl Cytosine
  modified_base (8)..(8): 2' Fluoro Guanosine
  modified_base (9)..(9): 2'O-Methyl Cytosine
  modified_base (10)..(10): 2' Fluoro Guanosine
  modified_base (11)..(11): 2'O-Methyl Cytosine
  modified_base (12)..(13): 2' Fluoro Guanosine
  modified_base (14)..(14): 2'O-Methyl Adenosine
  modified_base (15)..(15): 2' Fluoro Guanosine
  modified_base (16)..(16): um
  modified_base (17)..(19): 2'O-Methyl Cytosine
  modified_base (20)..(20): um
  modified_base (21)..(22): 2'O-Methyl Adenosine
  modified_base (23)..(25): um
  modified_base (26)..(29): 2' Fluoro Guanosine
  modified_base (30)..(30): 2'O-Methyl Cytosine
  modified_base (31)..(31): 2' Fluoro Guanosine
  modified_base (32)..(34): um
  modified_base (35)..(35): 2' Fluoro Guanosine
  modified_base (36)..(36): um
  modified_base (37)..(37): 2'O-Methyl Cytosine
  modified_base (38)..(38): 2' Fluoro Guanosine
cgacuccgcgcggagucccuaauuuggggcguuugucg

SEQ ID NO: 5 - RNA, 38 nt, Artificial Sequence
  Aptamer
  modified_base (1)..(1): 2'O-Methyl Cytosine
  modified_base (2)..(2): 2' Fluoro Guanosine
  modified_base (3)..(3): 2'O-Methyl Adenosine
  modified_base (4)..(4): 2'O-Methyl Cytosine
  modified_base (5)..(5): um
  modified_base (6)..(7): 2'O-Methyl Cytosine
  modified_base (8)..(8): 2' Fluoro Guanosine
  modified_base (9)..(9): 2'O-Methyl Cytosine
  modified_base (10)..(10): 2' Fluoro Guanosine
  modified_base (11)..(11): 2'O-Methyl Cytosine
  modified_base (12)..(13): 2' Fluoro Guanosine
  modified_base (14)..(14): 2'O-Methyl Adenosine
  modified_base (15)..(15): 2' Fluoro Guanosine
  modified_base (16)..(16): um
  modified_base (17)..(19): 2'O-Methyl Cytosine
  modified_base (20)..(21): um
  modified_base (22)..(22): 2'O-Methyl Cytosine
  modified_base (23)..(23): 2'O-Methyl Adenosine
  modified_base (24)..(25): um
  modified_base (26)..(29): 2' Fluoro Guanosine
  modified_base (30)..(30): 2'O-Methyl Cytosine
  modified_base (31)..(31): 2' Fluoro Guanosine
  modified_base (32)..(34): um
  modified_base (35)..(35): 2' Fluoro Guanosine
  modified_base (36)..(36): um
  modified_base (37)..(37): 2'O-Methyl Cytosine
  modified_base (38)..(38): 2' Fluoro Guanosine
cgacuccgcgcggagucccuucauuggggcguuugucg

SEQ ID NO: 6 - RNA, 38 nt, Artificial Sequence
  Aptamer
  modified_base (1)..(1): 2'O-Methyl Cytosine
  modified_base (2)..(2): 2' Fluoro Guanosine
  modified_base (3)..(3): 2'O-Methyl Adenosine
  modified_base (4)..(4): 2'O-Methyl Cytosine
  modified_base (5)..(5): um
  modified_base (6)..(7): 2'O-Methyl Cytosine
  modified_base (8)..(8): 2' Fluoro Guanosine
  modified_base (9)..(9): 2'O-Methyl Cytosine
  modified_base (10)..(10): 2' Fluoro Guanosine
  modified_base (11)..(11): 2'O-Methyl Cytosine
  modified_base (12)..(13): 2' Fluoro Guanosine
  modified_base (14)..(14): 2'O-Methyl Adenosine
  modified_base (15)..(17): 2' Fluoro Guanosine
  modified_base (18)..(19): um
  modified_base (20)..(21): 2'O-Methyl Adenosine
  modified_base (22)..(22): um
  modified_base (23)..(24): 2' Fluoro Guanosine
  modified_base (25)..(25): 2'O-Methyl Cytosine
  modified_base (26)..(26): um
  modified_base (27)..(27): 2'O-Methyl Adenosine
  modified_base (28)..(30): 2'O-Methyl Cytosine
  modified_base (31)..(31): 2' Fluoro Guanosine
  modified_base (32)..(34): um
  modified_base (35)..(35): 2' Fluoro Guanosine
  modified_base (36)..(36): um
  modified_base (37)..(37): 2'O-Methyl Cytosine
  modified_base (38)..(38): 2' Fluoro Guanosine
cgacuccgcgcggaggguuaauggcuacccguuugucg

SEQ ID NO: 7 - RNA, 38 nt, Artificial Sequence
  Aptamer
  modified_base (1)..(1): 2'O-Methyl Cytosine
  modified_base (2)..(2): 2' Fluoro Guanosine
  modified_base (3)..(3): 2'O-Methyl Adenosine
  modified_base (4)..(4): 2'O-Methyl Cytosine
  modified_base (5)..(5): um
  modified_base (6)..(7): 2'O-Methyl Cytosine
  modified_base (8)..(8): 2' Fluoro Guanosine
  modified_base (9)..(9): 2'O-Methyl Cytosine
  modified_base (10)..(10): 2' Fluoro Guanosine
  modified_base (11)..(11): 2'O-Methyl Cytosine
  modified_base (12)..(13): 2' Fluoro Guanosine
  modified_base (14)..(14): 2'O-Methyl Adenosine
  modified_base (15)..(15): 2' Fluoro Guanosine
  modified_base (16)..(16): um
  modified_base (17)..(19): 2'O-Methyl Cytosine
  modified_base (20)..(20): um
  modified_base (21)..(21): 2' Fluoro Guanosine
  modified_base (22)..(22): um
  modified_base (23)..(24): 2'O-Methyl Adenosine
  modified_base (25)..(25): um
  modified_base (26)..(29): 2' Fluoro Guanosine
  modified_base (30)..(30): 2'O-Methyl Cytosine
  modified_base (31)..(31): 2' Fluoro Guanosine
  modified_base (32)..(34): um
  modified_base (35)..(35): 2' Fluoro Guanosine
  modified_base (36)..(36): um
  modified_base (37)..(37): 2'O-Methyl Cytosine
  modified_base (38)..(38): 2' Fluoro Guanosine
cgacuccgcgcggagucccuguaauggggcguuugucg

SEQ ID NO: 8 - RNA, 36 nt, Artificial Sequence
  Aptamer
  modified_base (1)..(1): 2'O-Methyl Cytosine
  modified_base (2)..(2): 2' Fluoro Guanosine
  modified_base (3)..(3): 2'O-Methyl Adenosine
  modified_base (4)..(4): 2'O-Methyl Cytosine
  modified_base (5)..(5): um
  modified_base (6)..(7): 2'O-Methyl Cytosine
  modified_base (8)..(8): 2' Fluoro Guanosine
  modified_base (9)..(9): 2'O-Methyl Cytosine
  modified_base (10)..(10): 2' Fluoro Guanosine
  modified_base (11)..(11): 2'O-Methyl Cytosine
  modified_base (12)..(13): 2' Fluoro Guanosine
  modified_base (14)..(14): 2'O-Methyl Adenosine
  modified_base (15)..(17): 2' Fluoro Guanosine
  modified_base (18)..(20): um
  modified_base (21)..(22): 2' Fluoro Guanosine
  modified_base (23)..(23): 2'O-Methyl Cytosine
  modified_base (24)..(24): um
  modified_base (25)..(25): 2'O-Methyl Adenosine
  modified_base (26)..(28): 2'O-Methyl Cytosine
  modified_base (29)..(29): 2' Fluoro Guanosine
  modified_base (30)..(32): um
  modified_base (33)..(33): 2' Fluoro Guanosine
  modified_base (34)..(34): um
  modified_base (35)..(35): 2'O-Methyl Cytosine
  modified_base (36)..(36): 2' Fluoro Guanosine
cgacuccgcgcggaggguuuggcuacccguuugucg

SEQ ID NO: 9 - RNA, 36 nt, Artificial Sequence
  Aptamer
  modified_base (1)..(1): 2'O-Methyl Cytosine
  modified_base (2)..(2): 2' Fluoro Guanosine
  modified_base (3)..(3): 2'O-Methyl Adenosine
  modified_base (4)..(4): 2'O-Methyl Cytosine
  modified_base (5)..(5): um
  modified_base (6)..(7): 2'O-Methyl Cytosine
  modified_base (8)..(8): 2' Fluoro Guanosine
  modified_base (9)..(9): 2'O-Methyl Cytosine
  modified_base (10)..(10): 2' Fluoro Guanosine
  modified_base (11)..(11): 2'O-Methyl Cytosine
  modified_base (12)..(13): 2' Fluoro Guanosine
  modified_base (14)..(14): 2'O-Methyl Adenosine
  modified_base (15)..(16): 2' Fluoro Guanosine
  modified_base (17)..(17): 2'O-Methyl Cytosine
  modified_base (18)..(19): um
  modified_base (20)..(20): 2' Fluoro Guanosine
  modified_base (21)..(21): 2'O-Methyl Adenosine
  modified_base (22)..(23): 2' Fluoro Guanosine
  modified_base (25)..(25): 2'O-Methyl Adenosine
  modified_base (26)..(26): 2' Fluoro Guanosine
  modified_base (27)..(28): 2'O-Methyl Cytosine
  modified_base (29)..(29): 2' Fluoro Guanosine
  modified_base (30)..(32): um
  modified_base (33)..(33): 2' Fluoro Guanosine
  modified_base (34)..(34): um
  modified_base (35)..(35): 2'O-Methyl Cytosine
  modified_base (36)..(36): 2' Fluoro Guanosine
cgacuccgcgcggaggcuugagguagccguuugucg

SEQ ID NO: 10 - RNA, 36 nt, Artificial Sequence
  Aptamer
  modified_base (1)..(1): 2'O-Methyl Cytosine
  modified_base (2)..(2): 2' Fluoro Guanosine
  modified_base (3)..(3): 2'O-Methyl Adenosine
  modified_base (4)..(4): 2'O-Methyl Cytosine
  modified_base (5)..(5): um
  modified_base (6)..(7): 2'O-Methyl Cytosine
  modified_base (8)..(8): 2' Fluoro Guanosine
  modified_base (9)..(9): 2'O-Methyl Cytosine
  modified_base (10)..(10): 2' Fluoro Guanosine
  modified_base (11)..(11): 2'O-Methyl Cytosine
  modified_base (12)..(13): 2' Fluoro Guanosine
  modified_base (14)..(14): 2'O-Methyl Adenosine
  modified_base (15)..(15): 2' Fluoro Guanosine
  modified_base (16)..(16): um
  modified_base (17)..(19): 2'O-Methyl Cytosine
  modified_base (20)..(20): 2'O-Methyl Adenosine
  modified_base (21)..(21): 2'O-Methyl Cytosine
  modified_base (22)..(22): 2'O-Methyl Adenosine
  modified_base (23)..(23): um
  modified_base (24)..(27): 2' Fluoro Guanosine
  modified_base (28)..(28): 2'O-Methyl Cytosine
  modified_base (29)..(29): 2' Fluoro Guanosine
  modified_base (30)..(32): um
  modified_base (33)..(33): 2' Fluoro Guanosine
  modified_base (34)..(34): um
  modified_base (35)..(35): 2'O-Methyl Cytosine
  modified_base (36)..(36): 2' Fluoro Guanosine
cgacuccgcgcggagucccacauggggcguuugucg

SEQ ID NO: 11 - RNA, 36 nt, Artificial Sequence
  Aptamer
  modified_base (1)..(1): 2'O-Methyl Cytosine
  modified_base (2)..(2): 2' Fluoro Guanosine
  modified_base (3)..(3): 2'O-Methyl Adenosine
  modified_base (4)..(4): 2'O-Methyl Cytosine
  modified_base (5)..(5): um
  modified_base (6)..(7): 2'O-Methyl Cytosine
  modified_base (8)..(8): 2' Fluoro Guanosine
  modified_base (9)..(9): 2'O-Methyl Cytosine
  modified_base (10)..(10): 2' Fluoro Guanosine
  modified_base (11)..(11): 2'O-Methyl Cytosine
  modified_base (12)..(13): 2' Fluoro Guanosine
  modified_base (14)..(14): 2'O-Methyl Adenosine
  modified_base (15)..(17): 2' Fluoro Guanosine
  modified_base (18)..(18): 2'O-Methyl Adenosine
  modified_base (19)..(19): um
  modified_base (20)..(20): 2' Fluoro Guanosine
  modified_base (21)..(21): 2'O-Methyl Adenosine
  modified_base (22)..(23): 2' Fluoro Guanosine
  modified_base (24)..(25): um
  modified_base (26)..(28): 2'O-Methyl Cytosine
  modified_base (29)..(29): 2' Fluoro Guanosine
  modified_base (30)..(32): um
  modified_base (33)..(33): 2' Fluoro Guanosine
  modified_base (34)..(34): um
  modified_base (35)..(35): 2'O-Methyl Cytosine
  modified_base (36)..(36): 2' Fluoro Guanosine
cgacuccgcgcggagggaugagguucccguuugucg

SEQ ID NO: 12 - RNA, 36 nt, Artificial Sequence
  Aptamer
  modified_base (1)..(1): 2'O-Methyl Cytosine
  modified_base (2)..(2): 2' Fluoro Guanosine
  modified_base (3)..(3): 2'O-Methyl Adenosine
  modified_base (4)..(4): 2'O-Methyl Cytosine
  modified_base (5)..(5): um
  modified_base (6)..(7): 2'O-Methyl Cytosine
  modified_base (8)..(8): 2' Fluoro Guanosine
  modified_base (9)..(9): 2'O-Methyl Cytosine
  modified_base (10)..(10): 2' Fluoro Guanosine
  modified_base (11)..(11): 2'O-Methyl Cytosine
  modified_base (12)..(13): 2' Fluoro Guanosine
  modified_base (14)..(14): 2'O-Methyl Adenosine
  modified_base (15)..(16): 2' Fluoro Guanosine
  modified_base (17)..(17): 2'O-Methyl Cytosine
  modified_base (18)..(18): 2'O-Methyl Adenosine
  modified_base (19)..(19): um
  modified_base (20)..(20): 2' Fluoro Guanosine
  modified_base (21)..(21): 2'O-Methyl Adenosine
  modified_base (22)..(23): 2' Fluoro Guanosine
  modified_base (24)..(25): um
  modified_base (26)..(26): 2' Fluoro Guanosine
  modified_base (27)..(28): 2'O-Methyl Cytosine
  modified_base (29)..(29): 2' Fluoro Guanosine
  modified_base (30)..(32): um
  modified_base (33)..(33): 2' Fluoro Guanosine
  modified_base (34)..(34): um
  modified_base (35)..(35): 2'O-Methyl Cytosine
  modified_base (36)..(36): 2' Fluoro Guanosine
cgacuccgcgcggaggcaugagguugccguuugucg

SEQ ID NO: 13 - RNA, 36 nt, Artificial Sequence
  Aptamer
  modified_base (1)..(1): 2'O-Methyl Cytosine
  modified_base (2)..(2): 2' Fluoro Guanosine
  modified_base (3)..(3): 2'O-Methyl Adenosine
  modified_base (4)..(4): 2'O-Methyl Cytosine
  modified_base (5)..(5): um
  modified_base (6)..(7): 2'O-Methyl Cytosine
  modified_base (8)..(8): 2' Fluoro Guanosine
  modified_base (9)..(9): 2'O-Methyl Cytosine
  modified_base (10)..(10): 2' Fluoro Guanosine
  modified_base (11)..(11): 2'O-Methyl Cytosine
  modified_base (12)..(13): 2' Fluoro Guanosine
  modified_base (14)..(14): 2'O-Methyl Adenosine
  modified_base (15)..(15): 2' Fluoro Guanosine
  modified_base (16)..(16): um
  modified_base (17)..(17): 2' Fluoro Guanosine
  modified_base (18)..(18): 2'O-Methyl Cytosine
  modified_base (19)..(19): um
  modified_base (20)..(20): 2' Fluoro Guanosine
  modified_base (21)..(21): 2'O-Methyl Adenosine
  modified_base (22)..(23): 2' Fluoro Guanosine
  modified_base (24)..(24): um
  modified_base (25)..(25): 2' Fluoro Guanosine
  modified_base (26)..(26): 2'O-Methyl Cytosine
  modified_base (27)..(27): 2'O-Methyl Adenosine
  modified_base (28)..(28): 2'O-Methyl Cytosine
  modified_base (29)..(29): 2' Fluoro Guanosine
  modified_base (30)..(32): um
  modified_base (33)..(33): 2' Fluoro Guanosine
  modified_base (34)..(34): um
  modified_base (35)..(35): 2'O-Methyl Cytosine
  modified_base (36)..(36): 2' Fluoro Guanosine
cgacuccgcgcggagugcugaggugcacguuugucg

SEQ ID NO: 14 - RNA, 33 nt, Artificial Sequence
  Aptamer
  misc_feature (1)..(1): The 2'O-Methyl cytosine is attached  through the linker 1,3-propanediolspacer to 2'O-Methyl cytosine of another nucleotide sequence CGAC
  modified_base (1)..(2): 2'O-Methyl Cytosine
  modified_base (3)..(3): 2' Fluoro Guanosine
  modified_base (4)..(4): 2'O-Methyl Cytosine
  modified_base (5)..(5): 2' Fluoro Guanosine
  modified_base (6)..(6): 2'O-Methyl Cytosine
  modified_base (7)..(8): 2' Fluoro Guanosine
  modified_base (9)..(9): 2'O-Methyl Adenosine
  modified_base (10)..(12): 2' Fluoro Guanosine
  modified_base (13)..(14): um
  modified_base (15)..(16): 2' Fluoro Guanosine
  modified_base (17)..(17): 2'O-Methyl Adenosine
  modified_base (18)..(19): 2' Fluoro Guanosine
  modified_base (20)..(21): um
  modified_base (22)..(22): 2'O-Methyl Adenosine
  modified_base (23)..(25): 2'O-Methyl Cytosine
  modified_base (26)..(26): 2' Fluoro Guanosine
  modified_base (27)..(29): um
  modified_base (30)..(30): 2' Fluoro Guanosine
  modified_base (31)..(31): um
  modified_base (32)..(32): 2'O-Methyl Cytosine
  modified_base (33)..(33): 2' Fluoro Guanosine
ccgcgcggaggguuggagguuacccguuugucg

SEQ ID NO: 15 - RNA, 33 nt, Artificial Sequence
  Aptamer
  misc_feature (1)..(1): The 2'O-Methyl cytosine is attached  through the linker 1,3-propanediolspacer to 2'O-Methyl cytosine of another nucleotide sequence CGAC
  modified_base (1)..(2): 2'O-Methyl Cytosine
  modified_base (3)..(3): 2' Fluoro Guanosine
  modified_base (4)..(4): 2'O-Methyl Cytosine
  modified_base (5)..(5): 2' Fluoro Guanosine
  modified_base (6)..(6): 2'O-Methyl Cytosine
  modified_base (7)..(8): 2' Fluoro Guanosine
  modified_base (9)..(9): 2'O-Methyl Adenosine
  modified_base (10)..(10): 2' Fluoro Guanosine
  modified_base (11)..(11): um
  modified_base (12)..(14): 2'O-Methyl Cytosine
  modified_base (15)..(15): um
  modified_base (16)..(17): 2'O-Methyl Adenosine
  modified_base (18)..(20): um
  modified_base (21)..(24): 2' Fluoro Guanosine
  modified_base (25)..(25): 2'O-Methyl Cytosine
  modified_base (26)..(26): 2' Fluoro Guanosine
  modified_base (27)..(29): um
  modified_base (30)..(30): 2' Fluoro Guanosine
  modified_base (31)..(31): um
  modified_base (32)..(32): 2'O-Methyl Cytosine
  modified_base (33)..(33): 2' Fluoro Guanosine
ccgcgcggagucccuaauuuggggcguuugucg

SEQ ID NO: 16 - RNA, 33 nt, Artificial Sequence
  Aptamer
  misc_feature (1)..(1): The 2'O-Methyl cytosine is attached  through the linker 1,3-propanediolspacer to 2'O-Methyl cytosine of another nucleotide sequence CGAC
  modified_base (1)..(2): 2'O-Methyl Cytosine
  modified_base (3)..(3): 2' Fluoro Guanosine
  modified_base (4)..(4): 2'O-Methyl Cytosine
  modified_base (5)..(5): 2' Fluoro Guanosine
  modified_base (6)..(6): 2'O-Methyl Cytosine
  modified_base (7)..(8): 2' Fluoro Guanosine
  modified_base (9)..(9): 2'O-Methyl Adenosine
  modified_base (10)..(10): 2' Fluoro Guanosine
  modified_base (11)..(11): um
  modified_base (12)..(14): 2'O-Methyl Cytosine
  modified_base (15)..(16): um
  modified_base (17)..(17): 2'O-Methyl Cytosine
  modified_base (18)..(18): 2'O-Methyl Adenosine
  modified_base (19)..(20): um
  modified_base (21)..(24): 2' Fluoro Guanosine
  modified_base (25)..(25): 2'O-Methyl Cytosine
  modified_base (26)..(26): 2' Fluoro Guanosine
  modified_base (27)..(29): um
  modified_base (30)..(30): 2' Fluoro Guanosine
  modified_base (31)..(31): um
  modified_base (32)..(32): 2'O-Methyl Cytosine
  modified_base (33)..(33): 2' Fluoro Guanosine
ccgcgcggagucccuucauuggggcguuugucg

SEQ ID NO: 17 - RNA, 33 nt, Artificial Sequence
  Aptamer
  misc_feature (1)..(1): The 2'O-Methyl cytosine is attached  through the linker 1,3-propanediolspacer to 2'O-Methyl cytosine of another nucleotide sequence CGAC
  modified_base (1)..(2): 2'O-Methyl Cytosine
  modified_base (3)..(3): 2' Fluoro Guanosine
  modified_base (4)..(4): 2'O-Methyl Cytosine
  modified_base (5)..(5): 2' Fluoro Guanosine
  modified_base (6)..(6): 2'O-Methyl Cytosine
  modified_base (7)..(8): 2' Fluoro Guanosine
  modified_base (9)..(9): 2'O-Methyl Adenosine
  modified_base (10)..(12): 2' Fluoro Guanosine
  modified_base (13)..(14): um
  modified_base (15)..(16): 2'O-Methyl Adenosine
  modified_base (17)..(17): um
  modified_base (18)..(19): 2' Fluoro Guanosine
  modified_base (20)..(20): 2'O-Methyl Cytosine
  modified_base (21)..(21): um
  modified_base (22)..(22): 2'O-Methyl Adenosine
  modified_base (23)..(25): 2'O-Methyl Cytosine
  modified_base (26)..(26): 2' Fluoro Guanosine
  modified_base (27)..(29): um
  modified_base (30)..(30): 2' Fluoro Guanosine
  modified_base (31)..(31): um
  modified_base (32)..(32): 2'O-Methyl Cytosine
  modified_base (33)..(33): 2' Fluoro Guanosine
ccgcgcggaggguuaauggcuacccguuugucg

SEQ ID NO: 18 - RNA, 33 nt, Artificial Sequence
  Aptamer
  misc_feature (1)..(1): The 2'O-Methyl cytosine is attached  through the linker 1,3-propanediolspacer to 2'O-Methyl cytosine of another nucleotide sequence CGAC
  modified_base (1)..(2): 2'O-Methyl Cytosine
  modified_base (3)..(3): 2' Fluoro Guanosine
  modified_base (4)..(4): 2'O-Methyl Cytosine
  modified_base (5)..(5): 2' Fluoro Guanosine
  modified_base (6)..(6): 2'O-Methyl Cytosine
  modified_base (7)..(8): 2' Fluoro Guanosine
  modified_base (9)..(9): 2'O-Methyl Adenosine
  modified_base (10)..(10): 2' Fluoro Guanosine
  modified_base (11)..(11): um
  modified_base (12)..(14): 2'O-Methyl Cytosine
  modified_base (15)..(15): um
  modified_base (16)..(16): 2' Fluoro Guanosine
  modified_base (17)..(17): um
  modified_base (18)..(19): 2'O-Methyl Adenosine
  modified_base (20)..(20): um
  modified_base (21)..(24): 2' Fluoro Guanosine
  modified_base (25)..(25): 2'O-Methyl Cytosine
  modified_base (26)..(26): 2' Fluoro Guanosine
  modified_base (27)..(29): um
  modified_base (30)..(30): 2' Fluoro Guanosine
  modified_base (31)..(31): um
  modified_base (32)..(32): 2'O-Methyl Cytosine
  modified_base (33)..(33): 2' Fluoro Guanosine
ccgcgcggagucccuguaauggggcguuugucg

SEQ ID NO: 19 - RNA, 31 nt, Artificial Sequence
  Aptamer
  misc_feature (1)..(1): The 2'O-Methyl cytosine is attached  through the linker 1,3-propanediolspacer to 2'O-Methyl cytosine of another nucleotide sequence CGAC
  modified_base (1)..(2): 2'O-Methyl Cytosine
  modified_base (3)..(3): 2' Fluoro Guanosine
  modified_base (4)..(4): 2'O-Methyl Cytosine
  modified_base (5)..(5): 2' Fluoro Guanosine
  modified_base (6)..(6): 2'O-Methyl Cytosine
  modified_base (7)..(8): 2' Fluoro Guanosine
  modified_base (9)..(9): 2'O-Methyl Adenosine
  modified_base (10)..(12): 2' Fluoro Guanosine
  modified_base (13)..(15): um
  modified_base (16)..(17): 2' Fluoro Guanosine
  modified_base (18)..(18): 2'O-Methyl Cytosine
  modified_base (19)..(19): um
  modified_base (20)..(20): 2'O-Methyl Adenosine
  modified_base (21)..(23): 2'O-Methyl Cytosine
  modified_base (24)..(24): 2' Fluoro Guanosine
  modified_base (25)..(27): um
  modified_base (28)..(28): 2' Fluoro Guanosine
  modified_base (29)..(29): um
  modified_base (30)..(30): 2'O-Methyl Cytosine
  modified_base (31)..(31): 2' Fluoro Guanosine
ccgcgcggaggguuuggcuacccguuugucg

SEQ ID NO: 20 - RNA, 31 nt, Artificial Sequence
  Aptamer
  misc_feature (1)..(1): The 2'O-Methyl cytosine is attached  through the linker 1,3-propanediolspacer to 2'O-Methyl cytosine of another nucleotide sequence CGAC
  modified_base (1)..(2): 2'O-Methyl Cytosine
  modified_base (3)..(3): 2' Fluoro Guanosine
  modified_base (4)..(4): 2'O-Methyl Cytosine
  modified_base (5)..(5): 2' Fluoro Guanosine
  modified_base (6)..(6): 2'O-Methyl Cytosine
  modified_base (7)..(8): 2' Fluoro Guanosine
  modified_base (9)..(9): 2'O-Methyl Adenosine
  modified_base (10)..(11): 2' Fluoro Guanosine
  modified_base (12)..(12): 2'O-Methyl Cytosine
  modified_base (13)..(14): um
  modified_base (15)..(15): 2' Fluoro Guanosine
  modified_base (16)..(16): 2'O-Methyl Adenosine
  modified_base (17)..(18): 2' Fluoro Guanosine
  modified_base (19)..(19): um
  modified_base (20)..(20): 2'O-Methyl Adenosine
  modified_base (21)..(21): 2' Fluoro Guanosine
  modified_base (22)..(23): 2'O-Methyl Cytosine
  modified_base (24)..(24): 2' Fluoro Guanosine
  modified_base (25)..(27): um
  modified_base (28)..(28): 2' Fluoro Guanosine
  modified_base (29)..(29): um
  modified_base (30)..(30): 2'O-Methyl Cytosine
  modified_base (31)..(31): 2' Fluoro Guanosine
ccgcgcggaggcuugagguagccguuugucg

SEQ ID NO: 21 - RNA, 31 nt, Artificial Sequence
  Aptamer
  misc_feature (1)..(1): The 2'O-Methyl cytosine is attached  through the linker 1,3-propanediolspacer to 2'O-Methyl cytosine of another nucleotide sequence CGAC
  modified_base (1)..(2): 2'O-Methyl Cytosine
  modified_base (3)..(3): 2' Fluoro Guanosine
  modified_base (4)..(4): 2'O-Methyl Cytosine
  modified_base (5)..(5): 2' Fluoro Guanosine
  modified_base (6)..(6): 2'O-Methyl Cytosine
  modified_base (7)..(8): 2' Fluoro Guanosine
  modified_base (9)..(9): 2'O-Methyl Adenosine
  modified_base (10)..(10): 2' Fluoro Guanosine
  modified_base (11)..(11): um
  modified_base (12)..(14): 2'O-Methyl Cytosine
  modified_base (15)..(15): 2'O-Methyl Adenosine
  modified_base (16)..(16): 2'O-Methyl Cytosine
  modified_base (17)..(17): 2'O-Methyl Adenosine
  modified_base (18)..(18): um
  modified_base (19)..(22): 2' Fluoro Guanosine
  modified_base (23)..(23): 2'O-Methyl Cytosine
  modified_base (24)..(24): 2' Fluoro Guanosine
  modified_base (25)..(27): um
  modified_base (28)..(28): 2' Fluoro Guanosine
  modified_base (29)..(29): um
  modified_base (30)..(30): 2'O-Methyl Cytosine
  modified_base (31)..(31): 2' Fluoro Guanosine
ccgcgcggagucccacauggggcguuugucg

SEQ ID NO: 22 - RNA, 31 nt, Artificial Sequence
  Aptamer
  misc_feature (1)..(1): The 2'O-Methyl cytosine is attached  through the linker 1,3-propanediolspacer to 2'O-Methyl cytosine of another nucleotide sequence CGAC
  modified_base (1)..(2): 2'O-Methyl Cytosine
  modified_base (3)..(3): 2' Fluoro Guanosine
  modified_base (4)..(4): 2'O-Methyl Cytosine
  modified_base (5)..(5): 2' Fluoro Guanosine
  modified_base (6)..(6): 2'O-Methyl Cytosine
  modified_base (7)..(8): 2' Fluoro Guanosine
  modified_base (9)..(9): 2'O-Methyl Adenosine
  modified_base (10)..(12): 2' Fluoro Guanosine
  modified_base (13)..(13): 2'O-Methyl Adenosine
  modified_base (14)..(14): um
  modified_base (15)..(15): 2' Fluoro Guanosine
  modified_base (16)..(16): 2'O-Methyl Adenosine
  modified_base (17)..(18): 2' Fluoro Guanosine
  modified_base (19)..(20): um
  modified_base (21)..(23): 2'O-Methyl Cytosine
  modified_base (24)..(24): 2' Fluoro Guanosine
  modified_base (25)..(27): um
  modified_base (28)..(28): 2' Fluoro Guanosine
  modified_base (29)..(29): um
  modified_base (30)..(30): 2'O-Methyl Cytosine
  modified_base (31)..(31): 2' Fluoro Guanosine
ccgcgcggagggaugagguucccguuugucg

SEQ ID NO: 23 - RNA, 31 nt, Artificial Sequence
  Aptamer
  misc_feature (1)..(1): The 2'O-Methyl cytosine is attached  through the linker 1,3-propanediolspacer to 2'O-Methyl cytosine of another nucleotide sequence CGAC
  modified_base (1)..(2): 2'O-Methyl Cytosine
  modified_base (3)..(3): 2' Fluoro Guanosine
  modified_base (4)..(4): 2'O-Methyl Cytosine
  modified_base (5)..(5): 2' Fluoro Guanosine
  modified_base (6)..(6): 2'O-Methyl Cytosine
  modified_base (7)..(8): 2' Fluoro Guanosine
  modified_base (9)..(9): 2'O-Methyl Adenosine
  modified_base (10)..(11): 2' Fluoro Guanosine
  modified_base (12)..(12): 2'O-Methyl Cytosine
  modified_base (13)..(13): 2'O-Methyl Adenosine
  modified_base (14)..(14): um
  modified_base (15)..(15): 2' Fluoro Guanosine
  modified_base (16)..(16): 2'O-Methyl Adenosine
  modified_base (17)..(18): 2' Fluoro Guanosine
  modified_base (19)..(20): um
  modified_base (21)..(21): 2' Fluoro Guanosine
  modified_base (22)..(23): 2'O-Methyl Cytosine
  modified_base (24)..(24): 2' Fluoro Guanosine
  modified_base (25)..(27): um
  modified_base (28)..(28): 2' Fluoro Guanosine
  modified_base (29)..(29): um
  modified_base (30)..(30): 2'O-Methyl Cytosine
  modified_base (31)..(31): 2' Fluoro Guanosine
ccgcgcggaggcaugagguugccguuugucg

SEQ ID NO: 24 - RNA, 31 nt, Artificial Sequence
  Aptamer
  misc_feature (1)..(1): The 2'O-Methyl cytosine is attached  through the linker 1,3-propanediolspacer to 2'O-Methyl cytosine of another nucleotide sequence CGAC
  modified_base (1)..(2): 2'O-Methyl Cytosine
  modified_base (3)..(3): 2' Fluoro Guanosine
  modified_base (4)..(4): 2'O-Methyl Cytosine
  modified_base (5)..(5): 2' Fluoro Guanosine
  modified_base (6)..(6): 2'O-Methyl Cytosine
  modified_base (7)..(8): 2' Fluoro Guanosine
  modified_base (9)..(9): 2'O-Methyl Adenosine
  modified_base (10)..(10): 2' Fluoro Guanosine
  modified_base (11)..(11): um
  modified_base (12)..(12): 2' Fluoro Guanosine
  modified_base (13)..(13): 2'O-Methyl Cytosine
  modified_base (14)..(14): um
  modified_base (15)..(15): 2' Fluoro Guanosine
  modified_base (16)..(16): 2'O-Methyl Adenosine
  modified_base (17)..(18): 2' Fluoro Guanosine
  modified_base (19)..(19): um
  modified_base (20)..(20): 2' Fluoro Guanosine
  modified_base (21)..(21): 2'O-Methyl Cytosine
  modified_base (22)..(22): 2'O-Methyl Adenosine
  modified_base (23)..(23): 2'O-Methyl Cytosine
  modified_base (24)..(24): 2' Fluoro Guanosine
  modified_base (25)..(27): um
  modified_base (28)..(28): 2' Fluoro Guanosine
  modified_base (29)..(29): um
  modified_base (30)..(30): 2'O-Methyl Cytosine
  modified_base (31)..(31): 2' Fluoro Guanosine
ccgcgcggagugcugaggugcacguuugucg

SEQ ID NO: 25 - RNA, 38 nt, Artificial Sequence; identical to SEQ ID NO: 3
  Aptamer
  modified_base (1)..(1): 2'O-Methyl Cytosine
  modified_base (2)..(2): gm
  modified_base (3)..(3): 2'O-Methyl Adenosine
  modified_base (4)..(4): 2'O-Methyl Cytosine
  modified_base (5)..(5): um
  modified_base (6)..(7): 2'O-Methyl Cytosine
  modified_base (8)..(8): 2' Fluoro Guanosine
  modified_base (9)..(9): 2'O-Methyl Cytosine
  modified_base (10)..(10): 2' Fluoro Guanosine
  modified_base (11)..(11): 2'O-Methyl Cytosine
  modified_base (12)..(13): 2' Fluoro Guanosine
  modified_base (14)..(14): 2'O-Methyl Adenosine
  modified_base (15)..(17): 2' Fluoro Guanosine
  modified_base (18)..(19): um
  modified_base (20)..(21): 2' Fluoro Guanosine
  modified_base (22)..(22): 2'O-Methyl Adenosine
  modified_base (23)..(24): 2' Fluoro Guanosine
  modified_base (25)..(26): um
  modified_base (27)..(27): 2'O-Methyl Adenosine
  modified_base (28)..(30): 2'O-Methyl Cytosine
  modified_base (31)..(31): 2' Fluoro Guanosine
  modified_base (32)..(34): um
  modified_base (35)..(35): gm
  modified_base (36)..(36): um
  modified_base (37)..(37): 2'O-Methyl Cytosine
  modified_base (38)..(38): gm

SEQ ID NO: 26 - RNA, 38 nt, Artificial Sequence; identical to SEQ ID NO: 4
  Aptamer
  modified_base (1)..(1): 2'O-Methyl Cytosine
  modified_base (2)..(2): gm
  modified_base (3)..(3): 2'O-Methyl Adenosine
  modified_base (4)..(4): 2'O-Methyl Cytosine
  modified_base (5)..(5): um
  modified_base (6)..(7): 2'O-Methyl Cytosine
  modified_base (8)..(8): 2' Fluoro Guanosine
  modified_base (9)..(9): 2'O-Methyl Cytosine
  modified_base (10)..(10): 2' Fluoro Guanosine
  modified_base (11)..(11): 2'O-Methyl Cytosine
  modified_base (12)..(13): 2' Fluoro Guanosine
  modified_base (14)..(14): 2'O-Methyl Adenosine
  modified_base (15)..(15): 2' Fluoro Guanosine
  modified_base (16)..(16): um
  modified_base (17)..(19): 2'O-Methyl Cytosine
  modified_base (20)..(20): um
  modified_base (21)..(22): 2'O-Methyl Adenosine
  modified_base (23)..(25): um
  modified_base (26)..(29): 2' Fluoro Guanosine
  modified_base (30)..(30): 2'O-Methyl Cytosine
  modified_base (31)..(31): 2' Fluoro Guanosine
  modified_base (32)..(34): um
  modified_base (35)..(35): gm
  modified_base (36)..(36): um
  modified_base (37)..(37): 2'O-Methyl Cytosine
  modified_base (38)..(38): gm

SEQ ID NO: 27 - RNA, 38 nt, Artificial Sequence; identical to SEQ ID NO: 5
  Aptamer
  modified_base (1)..(1): 2'O-Methyl Cytosine
  modified_base (2)..(2): gm
  modified_base (3)..(3): 2'O-Methyl Adenosine
  modified_base (4)..(4): 2'O-Methyl Cytosine
  modified_base (5)..(5): um
  modified_base (6)..(7): 2'O-Methyl Cytosine
  modified_base (8)..(8): 2' Fluoro Guanosine
  modified_base (9)..(9): 2'O-Methyl Cytosine
  modified_base (10)..(10): 2' Fluoro Guanosine
  modified_base (11)..(11): 2'O-Methyl Cytosine
  modified_base (12)..(13): 2' Fluoro Guanosine
  modified_base (14)..(14): 2'O-Methyl Adenosine
  modified_base (15)..(15): 2' Fluoro Guanosine
  modified_base (16)..(16): um
  modified_base (17)..(19): 2'O-Methyl Cytosine
  modified_base (20)..(21): um
  modified_base (22)..(22): 2'O-Methyl Cytosine
  modified_base (23)..(23): 2'O-Methyl Adenosine
  modified_base (24)..(25): um
  modified_base (26)..(29): 2' Fluoro Guanosine
  modified_base (30)..(30): 2'O-Methyl Cytosine
  modified_base (31)..(31): 2' Fluoro Guanosine
  modified_base (32)..(34): um
  modified_base (35)..(35): gm
  modified_base (36)..(36): um
  modified_base (37)..(37): 2'O-Methyl Cytosine
  modified_base (38)..(38): gm

SEQ ID NO: 28 - RNA, 38 nt, Artificial Sequence; identical to SEQ ID NO: 6
  Aptamer
  modified_base (1)..(1): 2'O-Methyl Cytosine
  modified_base (2)..(2): gm
  modified_base (3)..(3): 2'O-Methyl Adenosine
  modified_base (4)..(4): 2'O-Methyl Cytosine
  modified_base (5)..(5): um
  modified_base (6)..(7): 2'O-Methyl Cytosine
  modified_base (8)..(8): 2' Fluoro Guanosine
  modified_base (9)..(9): 2'O-Methyl Cytosine
  modified_base (10)..(10): 2' Fluoro Guanosine
  modified_base (11)..(11): 2'O-Methyl Cytosine
  modified_base (12)..(13): 2' Fluoro Guanosine
  modified_base (14)..(14): 2'O-Methyl Adenosine
  modified_base (15)..(15): 2' Fluoro Guanosine
  modified_base (16)..(16): um
  modified_base (17)..(19): 2'O-Methyl Cytosine
  modified_base (20)..(21): um
  modified_base (22)..(22): 2'O-Methyl Cytosine
  modified_base (23)..(23): 2'O-Methyl Adenosine
  modified_base (24)..(25): um
  modified_base (26)..(29): 2' Fluoro Guanosine
  modified_base (30)..(30): 2'O-Methyl Cytosine
  modified_base (31)..(31): 2' Fluoro Guanosine
  modified_base (32)..(34): um
  modified_base (35)..(35): gm
  modified_base (36)..(36): um
  modified_base (37)..(37): 2'O-Methyl Cytosine
  modified_base (38)..(38): gm

SEQ ID NO: 29 - RNA, 38 nt, Artificial Sequence; identical to SEQ ID NO: 7
  Apatamer
  modified_base (1)..(1): 2'O-Methyl Cytosine
  modified_base (2)..(2): gm
  modified_base (3)..(3): 2'O-Methyl Adenosine
  modified_base (4)..(4): 2'O-Methyl Cytosine
  modified_base (5)..(5): um
  modified_base (6)..(7): 2'O-Methyl Cytosine
  modified_base (8)..(8): 2' Fluoro Guanosine
  modified_base (9)..(9): 2'O-Methyl Cytosine
  modified_base (10)..(10): 2' Fluoro Guanosine
  modified_base (11)..(11): 2'O-Methyl Cytosine
  modified_base (12)..(13): 2' Fluoro Guanosine
  modified_base (14)..(14): 2'O-Methyl Adenosine
  modified_base (15)..(15): 2' Fluoro Guanosine
  modified_base (16)..(16): um
  modified_base (17)..(19): 2'O-Methyl Cytosine
  modified_base (20)..(20): um
  modified_base (21)..(21): 2' Fluoro Guanosine
  modified_base (22)..(22): um
  modified_base (23)..(24): 2'O-Methyl Adenosine
  modified_base (25)..(25): um
  modified_base (26)..(29): 2' Fluoro Guanosine
  modified_base (30)..(30): 2'O-Methyl Cytosine
  modified_base (31)..(31): 2' Fluoro Guanosine
  modified_base (32)..(34): um
  modified_base (35)..(35): gm
  modified_base (36)..(36): um
  modified_base (37)..(37): 2'O-Methyl Cytosine
  modified_base (38)..(38): gm

SEQ ID NO: 30 - RNA, 36 nt, Artificial Sequence; identical to SEQ ID NO: 8
  Aptamer
  modified_base (1)..(1): 2'O-Methyl Cytosine
  modified_base (2)..(2): gm
  modified_base (3)..(3): 2'O-Methyl Adenosine
  modified_base (4)..(4): 2'O-Methyl Cytosine
  modified_base (5)..(5): um
  modified_base (6)..(7): 2'O-Methyl Cytosine
  modified_base (8)..(8): 2' Fluoro Guanosine
  modified_base (9)..(9): 2'O-Methyl Cytosine
  modified_base (10)..(10): 2' Fluoro Guanosine
  modified_base (11)..(11): 2'O-Methyl Cytosine
  modified_base (12)..(13): 2' Fluoro Guanosine
  modified_base (14)..(14): 2'O-Methyl Adenosine
  modified_base (15)..(17): 2' Fluoro Guanosine
  modified_base (18)..(20): um
  modified_base (21)..(22): 2' Fluoro Guanosine
  modified_base (23)..(23): 2'O-Methyl Cytosine
  modified_base (24)..(24): um
  modified_base (25)..(25): 2'O-Methyl Adenosine
  modified_base (26)..(28): 2'O-Methyl Cytosine
  modified_base (29)..(29): 2' Fluoro Guanosine
  modified_base (30)..(32): um
  modified_base (33)..(33): gm
  modified_base (34)..(34): um
  modified_base (35)..(35): 2'O-Methyl Cytosine
  modified_base (36)..(36): gm

SEQ ID NO: 31 - RNA, 36 nt, Artificial Sequence; identical to SEQ ID NO: 9
  Aptamer
  modified_base (1)..(1): 2'O-Methyl Cytosine
  modified_base (2)..(2): gm
  modified_base (3)..(3): 2'O-Methyl Adenosine
  modified_base (4)..(4): 2'O-Methyl Cytosine
  modified_base (5)..(5): um
  modified_base (6)..(7): 2'O-Methyl Cytosine
  modified_base (8)..(8): 2' Fluoro Guanosine
  modified_base (9)..(9): 2'O-Methyl Cytosine
  modified_base (10)..(10): 2' Fluoro Guanosine
  modified_base (11)..(11): 2'O-Methyl Cytosine
  modified_base (12)..(13): 2' Fluoro Guanosine
  modified_base (14)..(14): 2'O-Methyl Adenosine
  modified_base (15)..(16): 2' Fluoro Guanosine
  modified_base (17)..(17): 2'O-Methyl Cytosine
  modified_base (18)..(19): um
  modified_base (20)..(20): 2' Fluoro Guanosine
  modified_base (21)..(21): 2'O-Methyl Adenosine
  modified_base (22)..(23): 2' Fluoro Guanosine
  modified_base (24)..(24): um
  modified_base (25)..(25): 2'O-Methyl Adenosine
  modified_base (26)..(26): 2' Fluoro Guanosine
  modified_base (27)..(28): 2'O-Methyl Cytosine
  modified_base (29)..(29): 2' Fluoro Guanosine
  modified_base (30)..(32): um
  modified_base (33)..(33): gm
  modified_base (34)..(34): um
  modified_base (35)..(35): 2'O-Methyl Cytosine
  modified_base (36)..(36): gm

SEQ ID NO: 32 - RNA, 36 nt, Artificial Sequence; identical to SEQ ID NO: 10
  Aptamer
  modified_base (1)..(1): 2'O-Methyl Cytosine
  modified_base (2)..(2): gm
  modified_base (3)..(3): 2'O-Methyl Adenosine
  modified_base (4)..(4): 2'O-Methyl Cytosine
  modified_base (5)..(5): um
  modified_base (6)..(7): 2'O-Methyl Cytosine
  modified_base (8)..(8): 2' Fluoro Guanosine
  modified_base (9)..(9): 2'O-Methyl Cytosine
  modified_base (10)..(10): 2' Fluoro Guanosine
  modified_base (11)..(11): 2'O-Methyl Cytosine
  modified_base (12)..(13): 2' Fluoro Guanosine
  modified_base (14)..(14): 2'O-Methyl Adenosine
  modified_base (15)..(15): 2' Fluoro Guanosine
  modified_base (16)..(16): um
  modified_base (17)..(19): 2'O-Methyl Cytosine
  modified_base (20)..(20): 2'O-Methyl Adenosine
  modified_base (21)..(21): 2'O-Methyl Cytosine
  modified_base (22)..(22): 2'O-Methyl Adenosine
  modified_base (23)..(23): um
  modified_base (24)..(27): 2' Fluoro Guanosine
  modified_base (28)..(28): 2'O-Methyl Cytosine
  modified_base (29)..(29): 2' Fluoro Guanosine
  modified_base (30)..(32): um
  modified_base (33)..(33): gm
  modified_base (34)..(34): um
  modified_base (35)..(35): 2'O-Methyl Cytosine
  modified_base (36)..(36): gm

SEQ ID NO: 33 - RNA, 36 nt, Artificial Sequence; identical to SEQ ID NO: 11
  Aptamer
  modified_base (1)..(1): 2'O-Methyl Cytosine
  modified_base (2)..(2): gm
  modified_base (3)..(3): 2'O-Methyl Adenosine
  modified_base (4)..(4): 2'O-Methyl Cytosine
  modified_base (5)..(5): um
  modified_base (6)..(7): 2'O-Methyl Cytosine
  modified_base (8)..(8): 2' Fluoro Guanosine
  modified_base (9)..(9): 2'O-Methyl Cytosine
  modified_base (10)..(10): 2' Fluoro Guanosine
  modified_base (11)..(11): 2'O-Methyl Cytosine
  modified_base (12)..(13): 2' Fluoro Guanosine
  modified_base (14)..(14): 2'O-Methyl Adenosine
  modified_base (15)..(17): 2' Fluoro Guanosine
  modified_base (18)..(18): 2'O-Methyl Adenosine
  modified_base (19)..(19): um
  modified_base (20)..(20): 2' Fluoro Guanosine
  modified_base (21)..(21): 2'O-Methyl Adenosine
  modified_base (22)..(23): 2' Fluoro Guanosine
  modified_base (24)..(25): um
  modified_base (26)..(28): 2'O-Methyl Cytosine
  modified_base (29)..(29): 2' Fluoro Guanosine
  modified_base (30)..(32): um
  modified_base (33)..(33): gm
  modified_base (34)..(34): um
  modified_base (35)..(35): 2'O-Methyl Cytosine
  modified_base (36)..(36): gm

SEQ ID NO: 34 - RNA, 36 nt, Artificial Sequence; identical to SEQ ID NO: 12
  Aptamer
  modified_base (1)..(1): 2'O-Methyl Cytosine
  modified_base (2)..(2): gm
  modified_base (3)..(3): 2'O-Methyl Adenosine
  modified_base (4)..(4): 2'O-Methyl Cytosine
  modified_base (5)..(5): um
  modified_base (6)..(7): 2'O-Methyl Cytosine
  modified_base (8)..(8): 2' Fluoro Guanosine
  modified_base (9)..(9): 2'O-Methyl Cytosine
  modified_base (10)..(10): 2' Fluoro Guanosine
  modified_base (11)..(11): 2'O-Methyl Cytosine
  modified_base (12)..(13): 2' Fluoro Guanosine
  modified_base (14)..(14): 2'O-Methyl Adenosine
  modified_base (15)..(16): 2' Fluoro Guanosine
  modified_base (17)..(17): 2'O-Methyl Cytosine
  modified_base (18)..(18): 2'O-Methyl Adenosine
  modified_base (19)..(19): um
  modified_base (20)..(20): 2' Fluoro Guanosine
  modified_base (21)..(21): 2'O-Methyl Adenosine
  modified_base (22)..(23): 2' Fluoro Guanosine
  modified_base (24)..(25): um
  modified_base (26)..(26): 2' Fluoro Guanosine
  modified_base (27)..(28): 2'O-Methyl Cytosine
  modified_base (29)..(29): 2' Fluoro Guanosine
  modified_base (30)..(32): um
  modified_base (33)..(33): gm
  modified_base (34)..(34): um
  modified_base (35)..(35): 2'O-Methyl Cytosine
  modified_base (36)..(36): gm

SEQ ID NO: 35 - RNA, 36 nt, Artificial Sequence; identical to SEQ ID NO: 13
  Aptamer
  modified_base (1)..(1): 2'O-Methyl Cytosine
  modified_base (2)..(2): gm
  modified_base (3)..(3): 2'O-Methyl Adenosine
  modified_base (4)..(4): 2'O-Methyl Cytosine
  modified_base (5)..(5): um
  modified_base (6)..(7): 2'O-Methyl Cytosine
  modified_base (8)..(8): 2' Fluoro Guanosine
  modified_base (9)..(9): 2'O-Methyl Cytosine
  modified_base (10)..(10): 2' Fluoro Guanosine
  modified_base (11)..(11): 2'O-Methyl Cytosine
  modified_base (12)..(13): 2' Fluoro Guanosine
  modified_base (14)..(14): 2'O-Methyl Adenosine
  modified_base (15)..(15): 2' Fluoro Guanosine
  modified_base (16)..(16): um
  modified_base (17)..(17): 2' Fluoro Guanosine
  modified_base (18)..(18): 2'O-Methyl Cytosine
  modified_base (19)..(19): um
  modified_base (20)..(20): 2' Fluoro Guanosine
  modified_base (21)..(21): 2'O-Methyl Adenosine
  modified_base (22)..(23): 2' Fluoro Guanosine
  modified_base (24)..(24): um
  modified_base (25)..(25): 2' Fluoro Guanosine
  modified_base (26)..(26): 2'O-Methyl Cytosine
  modified_base (27)..(27): 2'O-Methyl Adenosine
  modified_base (28)..(28): 2'O-Methyl Cytosine
  modified_base (29)..(29): 2' Fluoro Guanosine
  modified_base (30)..(32): um
  modified_base (33)..(33): gm
  modified_base (34)..(34): um
  modified_base (35)..(35): 2'O-Methyl Cytosine
  modified_base (36)..(36): gm

SEQ ID NO: 36 - RNA, 33 nt, Artificial Sequence; identical to SEQ ID NO: 14
  Aptamer
  misc_feature (1)..(1): The 2'O-Methyl cytosine is attached through the linker 1,3-propanediolspacer to another nucleotide sequence CXAC
  modified_base (1)..(2): 2'O-Methyl Cytosine
  modified_base (3)..(3): 2' Fluoro Guanosine
  modified_base (4)..(4): 2'O-Methyl Cytosine
  modified_base (5)..(5): 2' Fluoro Guanosine
  modified_base (6)..(6): 2'O-Methyl Cytosine
  modified_base (7)..(8): 2' Fluoro Guanosine
  modified_base (9)..(9): 2'O-Methyl Adenosine
  modified_base (10)..(12): 2' Fluoro Guanosine
  modified_base (13)..(14): um
  modified_base (15)..(16): 2' Fluoro Guanosine
  modified_base (17)..(17): 2'O-Methyl Adenosine
  modified_base (18)..(19): 2' Fluoro Guanosine
  modified_base (20)..(21): um
  modified_base (22)..(22): 2'O-Methyl Adenosine
  modified_base (23)..(25): 2'O-Methyl Cytosine
  modified_base (26)..(26): 2' Fluoro Guanosine
  modified_base (27)..(29): um
  modified_base (30)..(30): gm
  modified_base (31)..(31): um
  modified_base (32)..(32): 2'O-Methyl Cytosine
  modified_base (33)..(33): gm

SEQ ID NO: 37 - RNA, 33 nt, Artificial Sequence; identical to SEQ ID NO: 15
  Aptamer
  misc_feature (1)..(1): The 2'O-Methyl cytosine is attached through the linker 1,3-propanediolspacer to another nucleotide sequence CXAC
  modified_base (1)..(2): 2'O-Methyl Cytosine
  modified_base (3)..(3): 2' Fluoro Guanosine
  modified_base (4)..(4): 2'O-Methyl Cytosine
  modified_base (5)..(5): 2' Fluoro Guanosine
  modified_base (6)..(6): 2'O-Methyl Cytosine
  modified_base (7)..(8): 2' Fluoro Guanosine
  modified_base (9)..(9): 2'O-Methyl Adenosine
  modified_base (10)..(10): 2' Fluoro Guanosine
  modified_base (11)..(11): um
  modified_base (12)..(14): 2'O-Methyl Cytosine
  modified_base (15)..(15): um
  modified_base (16)..(17): 2'O-Methyl Adenosine
  modified_base (18)..(20): um
  modified_base (21)..(24): 2' Fluoro Guanosine
  modified_base (25)..(25): 2'O-Methyl Cytosine
  modified_base (26)..(26): 2' Fluoro Guanosine
  modified_base (27)..(29): um
  modified_base (30)..(30): gm
  modified_base (31)..(31): um
  modified_base (32)..(32): 2'O-Methyl Cytosine
  modified_base (33)..(33): gm

SEQ ID NO: 38 - RNA, 33 nt, Artificial Sequence; identical to SEQ ID NO: 16
  Aptamer
  misc_feature (1)..(1): The 2'O-Methyl cytosine is attached through the linker 1,3-propanediolspacer to another nucleotide sequence CXAC
  modified_base (1)..(2): 2'O-Methyl Cytosine
  modified_base (3)..(3): 2' Fluoro Guanosine
  modified_base (4)..(4): 2'O-Methyl Cytosine
  modified_base (5)..(5): 2' Fluoro Guanosine
  modified_base (6)..(6): 2'O-Methyl Cytosine
  modified_base (7)..(8): 2' Fluoro Guanosine
  modified_base (9)..(9): 2'O-Methyl Adenosine
  modified_base (10)..(10): 2' Fluoro Guanosine
  modified_base (11)..(11): um
  modified_base (12)..(14): 2'O-Methyl Cytosine
  modified_base (15)..(16): um
  modified_base (17)..(17): 2'O-Methyl Cytosine
  modified_base (18)..(18): 2'O-Methyl Adenosine
  modified_base (19)..(20): um
  modified_base (21)..(24): 2' Fluoro Guanosine
  modified_base (25)..(25): 2'O-Methyl Cytosine
  modified_base (26)..(26): 2' Fluoro Guanosine
  modified_base (27)..(29): um
  modified_base (30)..(30): gm
  modified_base (31)..(31): um
  modified_base (32)..(32): 2'O-Methyl Cytosine
  modified_base (33)..(33): gm

SEQ ID NO: 39 - RNA, 33 nt, Artificial Sequence; identical to SEQ ID NO: 17
  Aptamer
  misc_feature (1)..(1): The 2'O-Methyl cytosine is attached through the linker 1,3-propanediolspacer to another nucleotide sequence CXAC
  modified_base (1)..(2): 2'O-Methyl Cytosine
  modified_base (3)..(3): 2' Fluoro Guanosine
  modified_base (4)..(4): 2'O-Methyl Cytosine
  modified_base (5)..(5): 2' Fluoro Guanosine
  modified_base (6)..(6): 2'O-Methyl Cytosine
  modified_base (7)..(8): 2' Fluoro Guanosine
  modified_base (9)..(9): 2'O-Methyl Adenosine
  modified_base (10)..(12): 2' Fluoro Guanosine
  modified_base (13)..(14): um
  modified_base (15)..(16): 2'O-Methyl Adenosine
  modified_base (17)..(17): um
  modified_base (18)..(19): 2' Fluoro Guanosine
  modified_base (20)..(20): 2'O-Methyl Cytosine
  modified_base (21)..(21): um
  modified_base (22)..(22): 2'O-Methyl Adenosine
  modified_base (23)..(25): 2'O-Methyl Cytosine
  modified_base (26)..(26): 2' Fluoro Guanosine
  modified_base (27)..(29): um
  modified_base (30)..(30): gm
  modified_base (31)..(31): um
  modified_base (32)..(32): 2'O-Methyl Cytosine
  modified_base (33)..(33): gm

SEQ ID NO: 40 - RNA, 33 nt, Artificial Sequence; identical to SEQ ID NO: 18
  Aptamer
  misc_feature (1)..(1): The 2'O-Methyl cytosine is attached through the linker 1,3-propanediolspacer to another nucleotide sequence CXAC
  modified_base (1)..(2): 2'O-Methyl Cytosine
  modified_base (3)..(3): 2' Fluoro Guanosine
  modified_base (4)..(4): 2'O-Methyl Cytosine
  modified_base (5)..(5): 2' Fluoro Guanosine
  modified_base (6)..(6): 2'O-Methyl Cytosine
  modified_base (7)..(8): 2' Fluoro Guanosine
  modified_base (9)..(9): 2'O-Methyl Adenosine
  modified_base (10)..(10): 2' Fluoro Guanosine
  modified_base (11)..(11): um
  modified_base (12)..(14): 2'O-Methyl Cytosine
  modified_base (15)..(15): um
  modified_base (16)..(16): 2' Fluoro Guanosine
  modified_base (17)..(17): um
  modified_base (18)..(19): 2'O-Methyl Adenosine
  modified_base (20)..(20): um
  modified_base (21)..(24): 2' Fluoro Guanosine
  modified_base (25)..(25): 2'O-Methyl Cytosine
  modified_base (26)..(26): 2' Fluoro Guanosine
  modified_base (27)..(29): um
  modified_base (30)..(30): gm
  modified_base (31)..(31): um
  modified_base (32)..(32): 2'O-Methyl Cytosine
  modified_base (33)..(33): gm

SEQ ID NO: 41 - RNA, 31 nt, Artificial Sequence; identical to SEQ ID NO: 19
  Aptamer
  misc_feature (1)..(1): The 2'O-Methyl cytosine is attached through the linker 1,3-propanediolspacer to another nucleotide sequence CXAC
  modified_base (1)..(2): 2'O-Methyl Cytosine
  modified_base (3)..(3): 2' Fluoro Guanosine
  modified_base (4)..(4): 2'O-Methyl Cytosine
  modified_base (5)..(5): 2' Fluoro Guanosine
  modified_base (6)..(6): 2'O-Methyl Cytosine
  modified_base (7)..(8): 2' Fluoro Guanosine
  modified_base (9)..(9): 2'O-Methyl Adenosine
  modified_base (10)..(12): 2' Fluoro Guanosine
  modified_base (13)..(15): um
  modified_base (16)..(17): 2' Fluoro Guanosine
  modified_base (18)..(18): 2'O-Methyl Cytosine
  modified_base (19)..(19): um
  modified_base (20)..(20): 2'O-Methyl Adenosine
  modified_base (21)..(23): 2'O-Methyl Cytosine
  modified_base (24)..(24): 2' Fluoro Guanosine
  modified_base (25)..(27): um
  modified_base (28)..(28): gm
  modified_base (29)..(29): um
  modified_base (30)..(30): 2'O-Methyl Cytosine
  modified_base (31)..(31): gm

SEQ ID NO: 42 - RNA, 31 nt, Artificial Sequence; identical to SEQ ID NO: 20
  Aptamer
  misc_feature (1)..(1): The 2'O-Methyl cytosine is attached through the linker 1,3-propanediolspacer to another nucleotide sequence CXAC
  modified_base (1)..(2): 2'O-Methyl Cytosine
  modified_base (3)..(3): 2' Fluoro Guanosine
  modified_base (4)..(4): 2'O-Methyl Cytosine
  modified_base (5)..(5): 2' Fluoro Guanosine
  modified_base (6)..(6): 2'O-Methyl Cytosine
  modified_base (7)..(8): 2' Fluoro Guanosine
  modified_base (9)..(9): 2'O-Methyl Adenosine
  modified_base (10)..(11): 2' Fluoro Guanosine
  modified_base (12)..(12): 2'O-Methyl Cytosine
  modified_base (13)..(14): um
  modified_base (15)..(15): 2' Fluoro Guanosine
  modified_base (16)..(16): 2'O-Methyl Adenosine
  modified_base (17)..(18): 2' Fluoro Guanosine
  modified_base (19)..(19): um
  modified_base (20)..(20): 2'O-Methyl Adenosine
  modified_base (21)..(21): 2' Fluoro Guanosine
  modified_base (22)..(23): 2'O-Methyl Cytosine
  modified_base (24)..(24): 2' Fluoro Guanosine
  modified_base (25)..(27): um
  modified_base (28)..(28): gm
  modified_base (29)..(29): um
  modified_base (30)..(30): 2'O-Methyl Cytosine
  modified_base (31)..(31): gm

SEQ ID NO: 43 - RNA, 31 nt, Artificial Sequence; identical to SEQ ID NO: 21
  Aptamer
  misc_feature (1)..(1): The 2'O-Methyl cytosine is attached through the linker 1,3-propanediolspacer to another nucleotide sequence CXAC
  modified_base (1)..(2): 2'O-Methyl Cytosine
  modified_base (3)..(3): 2' Fluoro Guanosine
  modified_base (4)..(4): 2'O-Methyl Cytosine
  modified_base (5)..(5): 2' Fluoro Guanosine
  modified_base (6)..(6): 2'O-Methyl Cytosine
  modified_base (7)..(8): 2' Fluoro Guanosine
  modified_base (9)..(9): 2'O-Methyl Adenosine
  modified_base (10)..(10): 2' Fluoro Guanosine
  modified_base (11)..(11): um
  modified_base (12)..(14): 2'O-Methyl Cytosine
  modified_base (15)..(15): 2'O-Methyl Adenosine
  modified_base (16)..(16): 2'O-Methyl Cytosine
  modified_base (17)..(17): 2'O-Methyl Adenosine
  modified_base (18)..(18): um
  modified_base (19)..(22): 2' Fluoro Guanosine
  modified_base (23)..(23): 2'O-Methyl Cytosine
  modified_base (24)..(24): 2' Fluoro Guanosine
  modified_base (25)..(27): um
  modified_base (28)..(28): gm
  modified_base (29)..(29): um
  modified_base (30)..(30): 2'O-Methyl Cytosine
  modified_base (31)..(31): gm

SEQ ID NO: 44 - RNA, 31 nt, Artificial Sequence; identical to SEQ ID NO: 22
  Aptamer
  misc_feature (1)..(1): The 2'O-Methyl cytosine is attached through the linker 1,3-propanediolspacer to another nucleotide sequence CXAC
  modified_base (1)..(2): 2'O-Methyl Cytosine
  modified_base (3)..(3): 2' Fluoro Guanosine
  modified_base (4)..(4): 2'O-Methyl Cytosine
  modified_base (5)..(5): 2' Fluoro Guanosine
  modified_base (6)..(6): 2'O-Methyl Cytosine
  modified_base (7)..(8): 2' Fluoro Guanosine
  modified_base (9)..(9): 2'O-Methyl Adenosine
  modified_base (10)..(12): 2' Fluoro Guanosine
  modified_base (13)..(13): 2'O-Methyl Adenosine
  modified_base (14)..(14): um
  modified_base (15)..(15): 2' Fluoro Guanosine
  modified_base (16)..(16): 2'O-Methyl Adenosine
  modified_base (17)..(18): 2' Fluoro Guanosine
  modified_base (19)..(20): um
  modified_base (21)..(23): 2'O-Methyl Cytosine
  modified_base (24)..(24): 2' Fluoro Guanosine
  modified_base (25)..(27): um
  modified_base (28)..(28): gm
  modified_base (29)..(29): um
  modified_base (30)..(30): 2'O-Methyl Cytosine
  modified_base (31)..(31): gm

SEQ ID NO: 45 - RNA, 31 nt, Artificial Sequence; identical to SEQ ID NO: 23
  Aptamer
  misc_feature (1)..(1): The 2'O-Methyl cytosine is attached through the linker 1,3-propanediolspacer to another nucleotide sequence CXAC
  modified_base (1)..(2): 2'O-Methyl Cytosine
  modified_base (3)..(3): 2' Fluoro Guanosine
  modified_base (4)..(4): 2'O-Methyl Cytosine
  modified_base (5)..(5): 2' Fluoro Guanosine
  modified_base (6)..(6): 2'O-Methyl Cytosine
  modified_base (7)..(8): 2' Fluoro Guanosine
  modified_base (9)..(9): 2'O-Methyl Adenosine
  modified_base (10)..(11): 2' Fluoro Guanosine
  modified_base (12)..(12): 2'O-Methyl Cytosine
  modified_base (13)..(13): 2'O-Methyl Adenosine
  modified_base (14)..(14): um
  modified_base (15)..(15): 2' Fluoro Guanosine
  modified_base (16)..(16): 2'O-Methyl Adenosine
  modified_base (17)..(18): 2' Fluoro Guanosine
  modified_base (19)..(20): um
  modified_base (21)..(21): 2' Fluoro Guanosine
  modified_base (22)..(23): 2'O-Methyl Cytosine
  modified_base (24)..(24): 2' Fluoro Guanosine
  modified_base (25)..(27): um
  modified_base (28)..(28): gm
  modified_base (29)..(29): um
  modified_base (30)..(30): 2'O-Methyl Cytosine
  modified_base (31)..(31): gm

SEQ ID NO: 46 - RNA, 31 nt, Artificial Sequence; identical to SEQ ID NO: 24
  Aptamer
  misc_feature (1)..(1): The 2'O-Methyl cytosine is attached through the linker 1,3-propanediolspacer to another nucleotide sequence CXAC
  modified_base (1)..(2): 2'O-Methyl Cytosine
  modified_base (3)..(3): 2' Fluoro Guanosine
  modified_base (4)..(4): 2'O-Methyl Cytosine
  modified_base (5)..(5): 2' Fluoro Guanosine
  modified_base (6)..(6): 2'O-Methyl Cytosine
  modified_base (7)..(8): 2' Fluoro Guanosine
  modified_base (9)..(9): 2'O-Methyl Adenosine
  modified_base (10)..(10): 2' Fluoro Guanosine
  modified_base (11)..(11): um
  modified_base (12)..(12): 2' Fluoro Guanosine
  modified_base (13)..(13): 2'O-Methyl Cytosine
  modified_base (14)..(14): um
  modified_base (15)..(15): 2' Fluoro Guanosine
  modified_base (16)..(16): 2'O-Methyl Adenosine
  modified_base (17)..(18): 2' Fluoro Guanosine
  modified_base (19)..(19): um
  modified_base (20)..(20): 2' Fluoro Guanosine
  modified_base (21)..(21): 2'O-Methyl Cytosine
  modified_base (22)..(22): 2'O-Methyl Adenosine
  modified_base (23)..(23): 2'O-Methyl Cytosine
  modified_base (24)..(24): 2' Fluoro Guanosine
  modified_base (25)..(27): um
  modified_base (28)..(28): gm
  modified_base (29)..(29): um
  modified_base (30)..(30): 2'O-Methyl Cytosine
  modified_base (31)..(31): gm

SEQ ID NO: 47 - RNA, 29 nt, Artificial Sequence
  Aptamer
  modified_base (1)..(1): gm
  modified_base (2)..(2): 2'O-Methyl Cytosine
  modified_base (3)..(4): gm
  modified_base (5)..(5): um
  modified_base (6)..(8): 2' Fluoro Guanosine
  modified_base (9)..(11): 2'O-Methyl Adenosine
  modified_base (12)..(12): um
  modified_base (13)..(13): 2' Fluoro Guanosine
  modified_base (14)..(14): um
  modified_base (15)..(15): 2' Fluoro Guanosine
  modified_base (16)..(16): 2'O-Methyl Adenosine
  modified_base (17)..(17): 2' Fluoro Guanosine
  modified_base (18)..(18): 2'O-Methyl Adenosine
  modified_base (19)..(19): um
  modified_base (20)..(22): 2' Fluoro Guanosine
  modified_base (23)..(24): um
  modified_base (25)..(25): gm
  modified_base (26)..(27): 2'O-Methyl Cytosine
  modified_base (28)..(28): gm
  modified_base (29)..(29): 2'O-Methyl Cytosine
gcggugggaaaugugagauggguugccgc

SEQ ID NO: 48 - RNA, 34 nt, Artificial Sequence
  Aptamer
  modified_base (1)..(2): gm
  modified_base (3)..(3): 2'O-Methyl Cytosine
  modified_base (4)..(4): gm
  modified_base (5)..(5): 2'O-Methyl Adenosine
  modified_base (6)..(6): 2'O-Methyl Cytosine
  modified_base (7)..(8): gm
  modified_base (9)..(9): um
  modified_base (10)..(10): 2'O-Methyl Adenosine
  modified_base (11)..(11): gm
  modified_base (12)..(12): 2'O-Methyl Adenosine
  modified_base (13)..(14): um
  modified_base (15)..(15): 2'O-Methyl Adenosine
  modified_base (16)..(16): um
  modified_base (17)..(19): 2' Fluoro Guanosine
  modified_base (20)..(20): 2'O-Methyl Cytosine
  modified_base (21)..(21): 2'O-Methyl Adenosine
  modified_base (22)..(22): 2' Fluoro Guanosine
  modified_base (23)..(23): um
  modified_base (24)..(24): 2' Fluoro Guanosine
  modified_base (25)..(25): um
  modified_base (26)..(26): 2' Fluoro Guanosine
  modified_base (27)..(27): 2'O-Methyl Adenosine
  modified_base (28)..(29): 2'O-Methyl Cytosine
  modified_base (30)..(30): gm
  modified_base (31)..(31): 2'O-Methyl Cytosine
  modified_base (32)..(32): gm
  modified_base (33)..(34): 2'O-Methyl Cytosine
ggcgacgguagauuaugggcagugugaccgcgcc

SEQ ID NO: 49 - RNA, 31 nt, Artificial Sequence
  Aptamer
  modified_base (1)..(1): gm
  modified_base (2)..(3): 2' Fluoro Guanosine
  modified_base (4)..(4): 2'O-Methyl Cytosine
  modified_base (5)..(7): 2'O-Methyl Adenosine
  modified_base (8)..(9): 2' Fluoro Guanosine
  modified_base (10)..(10): 2'O-Methyl Cytosine
  modified_base (11)..(13): 2'O-Methyl Adenosine
  modified_base (14)..(14): um
  modified_base (15)..(15): 2'O-Methyl Cytosine
  modified_base (16)..(19): 2'O-Methyl Adenosine
  modified_base (20)..(21): 2'O-Methyl Cytosine
  modified_base (22)..(22): 2' Fluoro Guanosine
  modified_base (23)..(24): um
  modified_base (25)..(25): 2'O-Methyl Adenosine
  modified_base (26)..(26): 2'O-Methyl Cytosine
  modified_base (27)..(28): 2'O-Methyl Adenosine
  modified_base (29)..(31): 2'O-Methyl Cytosine
gggcaaaggcaaaucaaaaccguuacaaccc

SEQ ID NO: 50 - RNA, 34 nt, Artificial Sequence
  Aptamer
  modified_base (1)..(1): 2'O-Methyl Adenosine
  modified_base (2)..(2): 2'O-Methyl Cytosine
  modified_base (3)..(6): 2' Fluoro Guanosine
  modified_base (7)..(7): 2'O-Methyl Cytosine
  modified_base (8)..(9): 2'O-Methyl Adenosine
  modified_base (10)..(10): um
  modified_base (11)..(12): 2'O-Methyl Cytosine
  modified_base (13)..(13): um
  modified_base (14)..(14): 2' Fluoro Guanosine
  modified_base (15)..(16): 2'O-Methyl Cytosine
  modified_base (17)..(17): 2' Fluoro Guanosine
  modified_base (18)..(21): um
  modified_base (22)..(22): 2'O-Methyl Adenosine
  modified_base (23)..(23): 2'O-Methyl Cytosine
  modified_base (24)..(24): 2'O-Methyl Adenosine
  modified_base (25)..(26): 2' Fluoro Guanosine
  modified_base (27)..(27): um
  modified_base (28)..(30): 2'O-Methyl Adenosine
  modified_base (31)..(31): gm
  modified_base (32)..(33): 2'O-Methyl Cytosine
  modified_base (34)..(34): 2' Fluoro Guanosine
acggggcaauccugccguuuuacagguaaagccg

SEQ ID NO: 51 - RNA, 38 nt, Artificial Sequence
  Aptamer
  modified_base (1)..(1): 2'Fluoro Cytosine
  modified_base (2)..(2): gm
  modified_base (3)..(4): 2'Fluoro Cytosine
  modified_base (6)..(6): 2'Fluoro Cytosine
  modified_base (7)..(8): gm
  modified_base (9)..(9): 2'Fluoro Uridine
  modified_base (10)..(10): 2'Fluoro Cytosine
  modified_base (11)..(11): 2'Fluoro Uridine
  modified_base (12)..(12): 2'Fluoro Cytosine
  modified_base (14)..(15): gm
  modified_base (16)..(16): 2'Fluoro Cytosine
  modified_base (18)..(18): 2'Fluoro Cytosine
  modified_base (19)..(19): 2'Fluoro Uridine
  modified_base (20)..(20): gm
  modified_base (22)..(22): gm
  modified_base (23)..(23): 2'Fluoro Uridine
  modified_base (24)..(24): 2'Fluoro Cytosine
  modified_base (25)..(25): 2'Fluoro Uridine
  modified_base (26)..(26): gm
  modified_base (28)..(28): gm
  modified_base (29)..(31): 2'Fluoro Uridine
  modified_base (33)..(34): 2'Fluoro Cytosine
  modified_base (35)..(35): 2'Fluoro Uridine
  modified_base (36)..(36): gm
  modified_base (37)..(37): 2'Fluoro Cytosine
  modified_base (38)..(38): gm
cgccgcggucucaggcgcugagucugaguuuaccugcg

SEQ ID NO: 52 - DNA, 12 bp, Artificial Sequence
  Aptamer
  misc_feature (1)..(1): The cytosine is attached  through the linker Hexaethyleneglycol spacer to 2'O-Methyl guanosine of another nucleotide sequence caggcUaCX
  modified_base (5)..(5): gm
  modified_base (7)..(7): gm
  modified_base (10)..(10): um
  modified_base (11)..(11): 2'O-Methyl Cytosine
  misc_feature (12)..(12): The 2'O-Methyl adenosine is attached  through the linker Hexaethyleneglycol spacer to thymine of another nucleotide sequence tgatCCUX
  modified_base (12)..(12): 2'O-Methyl Adenosine
cgtagagcatca

SEQ ID NO: 53 - RNA, 36 nt, Artificial Sequence
  Aptamer
  modified_base (1)..(3): gm
  modified_base (4)..(4): 2'O-Methyl Adenosine
  modified_base (5)..(5): um
  modified_base (6)..(6): 2'O-Methyl Adenosine
  modified_base (7)..(7): 2'O-Methyl Cytosine
  modified_base (8)..(8): 2'Fluoro Uridine
  modified_base (9)..(9): 2'O-Methyl Adenosine
  modified_base (10)..(11): gm
  modified_base (12)..(12): (rG)
  modified_base (13)..(13): 2'O-Methyl Cytosine
  modified_base (14)..(14): 2'O-Methyl Adenosine
  modified_base (15)..(15): um
  modified_base (16)..(16): 2'Fluoro Uridine
  modified_base (17)..(18): 2'O-Methyl Adenosine
  modified_base (19)..(19): um
  modified_base (20)..(20): gm
  modified_base (21)..(21): 2'Fluoro Uridine
  modified_base (22)..(22): um
  modified_base (23)..(23): 2'O-Methyl Adenosine
  modified_base (24)..(25): 2'O-Methyl Cytosine
  modified_base (26)..(26): 2'O-Methyl Adenosine
  modified_base (27)..(27): (rG)
  modified_base (28)..(28): 2'Fluoro Uridine
  modified_base (29)..(29): (rG)
  modified_base (30)..(30): 2'Fluoro Uridine
  modified_base (31)..(31): 2'O-Methyl Adenosine
  modified_base (32)..(32): gm
  modified_base (33)..(33): um
  modified_base (34)..(36): 2'O-Methyl Cytosine
gggauacuagggcauuaauguuaccaguguaguccc

SEQ ID NO: 54 - RNA, 39 nt, Artificial Sequence
  Aptamer
  modified_base (1)..(2): 2'O-Methyl Cytosine
  modified_base (3)..(3): gm
  modified_base (4)..(5): 2'O-Methyl Cytosine
  modified_base (6)..(7): um
  modified_base (8)..(8): 2' Fluoro Guanosine
  modified_base (9)..(10): 2'O-Methyl Cytosine
  modified_base (11)..(11): 2'O-Methyl Adenosine
  modified_base (12)..(12): 2' Fluoro Guanosine
  modified_base (13)..(13): um
  modified_base (14)..(14): 2'O-Methyl Adenosine
  modified_base (15)..(16): um
  modified_base (17)..(18): 2' Fluoro Guanosine
  modified_base (19)..(19): 2'O-Methyl Cytosine
  modified_base (20)..(21): um
  modified_base (22)..(22): 2'O-Methyl Adenosine
  modified_base (23)..(24): 2' Fluoro Guanosine
  modified_base (25)..(25): 2'O-Methyl Cytosine
  modified_base (26)..(26): um
  modified_base (27)..(28): 2' Fluoro Guanosine
  modified_base (29)..(30): 2'O-Methyl Adenosine
  modified_base (31)..(31): 2' Fluoro Guanosine
  modified_base (32)..(34): um
  modified_base (35)..(36): gm
  modified_base (37)..(37): 2'O-Methyl Cytosine
  modified_base (38)..(39): gm
ccgccuugccaguauuggcuuaggcuggaaguuuggcgg

SEQ ID NO: 55 - RNA, 33 nt, Artificial Sequence; identical to SEQ ID NO: 1
  Aptamer
  misc_feature (1)..(1): The 2'O-Methyl cytosine is attached through the linker 1,3-propanediolspacer to another nucleotide sequence CXAC
  modified_base (1)..(2): 2'O-Methyl Cytosine
  modified_base (3)..(3): 2' Fluoro Guanosine
  modified_base (4)..(4): 2'O-Methyl Cytosine
  modified_base (5)..(5): 2' Fluoro Guanosine
  modified_base (6)..(6): 2'O-Methyl Cytosine
  modified_base (7)..(8): 2' Fluoro Guanosine
  modified_base (9)..(9): 2'O-Methyl Adenosine
  modified_base (10)..(12): 2' Fluoro Guanosine
  modified_base (13)..(13): gm
  modified_base (14)..(16): um
  modified_base (17)..(17): 2'O-Methyl Cytosine
  modified_base (18)..(18): 2'O-Methyl Adenosine
  modified_base (19)..(19): um
  modified_base (20)..(21): 2'O-Methyl Adenosine
  modified_base (22)..(22): um
  modified_base (23)..(25): 2'O-Methyl Cytosine
  modified_base (26)..(26): 2' Fluoro Guanosine
  modified_base (27)..(29): um
  modified_base (30)..(30): gm
  modified_base (31)..(31): um
  modified_base (32)..(32): 2'O-Methyl Cytosine
  modified_base (33)..(33): gm
  modified_base (33)..(33): inverted deoxythymidine incorporated at the 3'  end

SEQ ID NO: 56 - RNA, 34 nt, Artificial Sequence; identical to SEQ ID NO: 48
  Aptamer
  modified_base (1)..(2): gm
  modified_base (3)..(3): 2'O-Methyl Cytosine
  modified_base (4)..(4): gm
  modified_base (5)..(5): 2'O-Methyl Adenosine
  modified_base (6)..(6): 2'O-Methyl Cytosine
  modified_base (7)..(8): gm
  modified_base (9)..(9): um
  modified_base (10)..(10): 2'O-Methyl Adenosine
  modified_base (11)..(11): gm
  modified_base (12)..(12): 2'O-Methyl Adenosine
  modified_base (13)..(14): um
  modified_base (15)..(15): 2'O-Methyl Adenosine
  modified_base (16)..(16): um
  modified_base (17)..(19): 2' Fluoro Guanosine
  modified_base (20)..(20): 2'O-Methyl Cytosine
  modified_base (21)..(21): 2'O-Methyl Adenosine
  modified_base (22)..(22): 2' Fluoro Guanosine
  modified_base (23)..(23): um
  modified_base (24)..(24): 2' Fluoro Guanosine
  modified_base (25)..(25): um
  modified_base (26)..(26): 2' Fluoro Guanosine
  modified_base (27)..(27): 2'O-Methyl Adenosine
  modified_base (28)..(29): 2'O-Methyl Cytosine
  modified_base (30)..(30): gm
  modified_base (31)..(31): 2'O-Methyl Cytosine
  modified_base (32)..(32): gm
  modified_base (33)..(34): 2'O-Methyl Cytosine
  modified_base (34)..(34): inverted deoxythymidine incorporated at the 3'  end

SEQ ID NO: 57 - RNA, 67 nt, Artificial Sequence
  Aptamer
  misc_feature (1)..(1): The 2'O-Methyl cytosine is attached through the linker 1,3-propanediolspacer to another nucleotide sequence CXAC
  modified_base (1)..(2): 2'O-Methyl Cytosine
  modified_base (3)..(3): 2' Fluoro Guanosine
  modified_base (4)..(4): 2'O-Methyl Cytosine
  modified_base (5)..(5): 2' Fluoro Guanosine
  modified_base (6)..(6): 2'O-Methyl Cytosine
  modified_base (7)..(8): 2' Fluoro Guanosine
  modified_base (9)..(9): 2'O-Methyl Adenosine
  modified_base (10)..(12): 2' Fluoro Guanosine
  modified_base (13)..(13): gm
  modified_base (14)..(16): um
  modified_base (17)..(17): 2'O-Methyl Cytosine
  modified_base (18)..(18): 2'O-Methyl Adenosine
  modified_base (19)..(19): um
  modified_base (20)..(21): 2'O-Methyl Adenosine
  modified_base (22)..(22): um
  modified_base (23)..(25): 2'O-Methyl Cytosine
  modified_base (26)..(26): 2' Fluoro Guanosine
  modified_base (27)..(29): um
  modified_base (30)..(30): gm
  modified_base (31)..(31): um
  modified_base (32)..(32): 2'O-Methyl Cytosine
  modified_base (33)..(35): gm
  modified_base (36)..(36): 2'O-Methyl Cytosine
  modified_base (37)..(37): gm
  modified_base (38)..(38): 2'O-Methyl Adenosine
  modified_base (39)..(39): 2'O-Methyl Cytosine
  modified_base (40)..(41): gm
  modified_base (42)..(42): um
  modified_base (43)..(43): 2'O-Methyl Adenosine
  modified_base (44)..(44): gm
  modified_base (45)..(45): 2'O-Methyl Adenosine
  modified_base (46)..(47): um
  modified_base (48)..(48): 2'O-Methyl Adenosine
  modified_base (49)..(49): um
  modified_base (50)..(52): 2' Fluoro Guanosine
  modified_base (53)..(53): 2'O-Methyl Cytosine
  modified_base (54)..(54): 2'O-Methyl Adenosine
  modified_base (55)..(55): 2' Fluoro Guanosine
  modified_base (56)..(56): um
  modified_base (57)..(57): 2' Fluoro Guanosine
  modified_base (58)..(58): um
  modified_base (59)..(59): 2' Fluoro Guanosine
  modified_base (60)..(60): 2'O-Methyl Adenosine
  modified_base (61)..(62): 2'O-Methyl Cytosine
  modified_base (63)..(63): gm
  modified_base (64)..(64): 2'O-Methyl Cytosine
  modified_base (65)..(65): gm
  modified_base (66)..(67): 2'O-Methyl Cytosine
  modified_base (67)..(67): inverted deoxythymidine incorporated at the 3'  end
ccgcgcggagggguuucauaaucccguuugucgggcgacgguagauuaugggcagugugaccgcgcc

SEQ ID NO: 58 - RNA, 33 nt, Artificial Sequence; identical to SEQ ID NO: 1
  Aptamer
  misc_feature (1)..(1): The 2'O-Methyl cytosine is attached through the linker 1,3-propanediolspacer to another nucleotide sequence CXAC
  modified_base (1)..(2): 2'O-Methyl Cytosine
  modified_base (3)..(3): 2' Fluoro Guanosine
  modified_base (4)..(4): 2'O-Methyl Cytosine
  modified_base (5)..(5): 2' Fluoro Guanosine
  modified_base (6)..(6): 2'O-Methyl Cytosine
  modified_base (7)..(8): 2' Fluoro Guanosine
  modified_base (9)..(9): 2'O-Methyl Adenosine
  modified_base (10)..(12): 2' Fluoro Guanosine
  modified_base (13)..(13): gm
  modified_base (14)..(16): um
  modified_base (17)..(17): 2'O-Methyl Cytosine
  modified_base (18)..(18): 2'O-Methyl Adenosine
  modified_base (19)..(19): um
  modified_base (20)..(21): 2'O-Methyl Adenosine
  modified_base (22)..(22): um
  modified_base (23)..(25): 2'O-Methyl Cytosine
  modified_base (26)..(26): 2' Fluoro Guanosine
  modified_base (27)..(29): um
  modified_base (30)..(30): gm
  modified_base (31)..(31): um
  modified_base (32)..(32): 2'O-Methyl Cytosine
  misc_feature (33)..(33): The 2'O-Methyl guanosine is attached  through the linker 1,3-propanediolspacer to 2'O-Methyl guanosine of SEQ ID NO: 391
  modified_base (33)..(33): gm

SEQ ID NO: 59 - RNA, 33 nt, Artificial Sequence; identical to SEQ ID NO: 1
  Aptamer
  misc_feature (1)..(1): The 2'O-Methyl cytosine is attached through the linker 1,3-propanediolspacer to another nucleotide sequence CXAC
  modified_base (1)..(2): 2'O-Methyl Cytosine
  modified_base (3)..(3): 2' Fluoro Guanosine
  modified_base (4)..(4): 2'O-Methyl Cytosine
  modified_base (5)..(5): 2' Fluoro Guanosine
  modified_base (6)..(6): 2'O-Methyl Cytosine
  modified_base (7)..(8): 2' Fluoro Guanosine
  modified_base (9)..(9): 2'O-Methyl Adenosine
  modified_base (10)..(12): 2' Fluoro Guanosine
  modified_base (13)..(13): gm
  modified_base (14)..(16): um
  modified_base (17)..(17): 2'O-Methyl Cytosine
  modified_base (18)..(18): 2'O-Methyl Adenosine
  modified_base (19)..(19): um
  modified_base (20)..(21): 2'O-Methyl Adenosine
  modified_base (22)..(22): um
  modified_base (23)..(25): 2'O-Methyl Cytosine
  modified_base (26)..(26): 2' Fluoro Guanosine
  modified_base (27)..(29): um
  modified_base (30)..(30): gm
  modified_base (31)..(31): um
  modified_base (32)..(32): 2'O-Methyl Cytosine
  misc_feature (33)..(33): The 2'O-Methyl guanosine is attached through the linker Hexaethylene glycol spacer to 2'O-Methyl guanosine of SEQ ID NO:392
  modified_base (33)..(33): gm

SEQ ID NO: 60 - RNA, 72 nt, Artificial Sequence
  Aptamer
  misc_feature (1)..(1): The 2'O-Methyl cytosine is attached  through the linker 1,3-propanediolspacer to 2'O-Methyl cytosine of another nucleotide sequence CXAC
  modified_base (1)..(2): 2'O-Methyl Cytosine
  modified_base (3)..(3): 2' Fluoro Guanosine
  modified_base (4)..(4): 2'O-Methyl Cytosine
  modified_base (5)..(5): 2' Fluoro Guanosine
  modified_base (6)..(6): 2'O-Methyl Cytosine
  modified_base (7)..(8): 2' Fluoro Guanosine
  modified_base (9)..(9): 2'O-Methyl Adenosine
  modified_base (10)..(12): 2' Fluoro Guanosine
  modified_base (13)..(13): gm
  modified_base (14)..(16): um
  modified_base (17)..(17): 2'O-Methyl Cytosine
  modified_base (18)..(18): 2'O-Methyl Adenosine
  modified_base (19)..(19): um
  modified_base (20)..(21): 2'O-Methyl Adenosine
  modified_base (22)..(22): um
  modified_base (23)..(25): 2'O-Methyl Cytosine
  modified_base (26)..(26): 2' Fluoro Guanosine
  modified_base (27)..(29): um
  modified_base (30)..(30): gm
  modified_base (31)..(31): um
  modified_base (32)..(32): 2'O-Methyl Cytosine
  modified_base (33)..(33): gm
  misc_feature (34)..(38): 2'O-Methyl deoxyuridine linker
  modified_base (34)..(38): 2'O-Methyl deoxyuridine
  modified_base (39)..(40): gm
  modified_base (41)..(41): 2'O-Methyl Cytosine
  modified_base (42)..(42): gm
  modified_base (43)..(43): 2'O-Methyl Adenosine
  modified_base (44)..(44): 2'O-Methyl Cytosine
  modified_base (45)..(46): gm
  modified_base (47)..(47): um
  modified_base (48)..(48): 2'O-Methyl Adenosine
  modified_base (49)..(49): gm
  modified_base (50)..(50): 2'O-Methyl Adenosine
  modified_base (51)..(52): um
  modified_base (53)..(53): 2'O-Methyl Adenosine
  modified_base (54)..(54): um
  modified_base (55)..(57): 2' Fluoro Guanosine
  modified_base (58)..(58): 2'O-Methyl Cytosine
  modified_base (59)..(59): 2'O-Methyl Adenosine
  modified_base (60)..(60): 2' Fluoro Guanosine
  modified_base (61)..(61): um
  modified_base (62)..(62): 2' Fluoro Guanosine
  modified_base (63)..(63): um
  modified_base (64)..(64): 2' Fluoro Guanosine
  modified_base (65)..(65): 2'O-Methyl Adenosine
  modified_base (66)..(67): 2'O-Methyl Cytosine
  modified_base (68)..(68): gm
  modified_base (69)..(69): 2'O-Methyl Cytosine
  modified_base (70)..(70): gm
  modified_base (71)..(72): 2'O-Methyl Cytosine
  modified_base (72)..(72): inverted deoxythymidine incorporated at the 3'  end
ccgcgcggagggguuucauaaucccguuugucguuuuuggcgacgguagauuaugggcagugugaccgcgcc

SEQ ID NO: 61 - RNA, 77 nt, Artificial Sequence
  Aptamer
  misc_feature (1)..(1): The 2'O-Methyl cytosine is attached  through the linker 1,3-propanediolspacer to 2'O-Methyl cytosine of another nucleotide sequence CXAC
  modified_base (1)..(2): 2'O-Methyl Cytosine
  modified_base (3)..(3): 2' Fluoro Guanosine
  modified_base (4)..(4): 2'O-Methyl Cytosine
  modified_base (5)..(5): 2' Fluoro Guanosine
  modified_base (6)..(6): 2'O-Methyl Cytosine
  modified_base (7)..(8): 2' Fluoro Guanosine
  modified_base (9)..(9): 2'O-Methyl Adenosine
  modified_base (10)..(12): 2' Fluoro Guanosine
  modified_base (13)..(13): gm
  modified_base (14)..(16): um
  modified_base (17)..(17): 2'O-Methyl Cytosine
  modified_base (18)..(18): 2'O-Methyl Adenosine
  modified_base (19)..(19): um
  modified_base (20)..(21): 2'O-Methyl Adenosine
  modified_base (22)..(22): um
  modified_base (23)..(25): 2'O-Methyl Cytosine
  modified_base (26)..(26): 2' Fluoro Guanosine
  modified_base (27)..(29): um
  modified_base (30)..(30): gm
  modified_base (31)..(31): um
  modified_base (32)..(32): 2'O-Methyl Cytosine
  modified_base (33)..(33): gm
  misc_feature (34)..(43): 2'O-Methyl deoxyuridine linker
  modified_base (34)..(43): 2'O-Methyl deoxyuridine
  modified_base (44)..(45): gm
  modified_base (46)..(46): 2'O-Methyl Cytosine
  modified_base (47)..(47): gm
  modified_base (48)..(48): 2'O-Methyl Adenosine
  modified_base (49)..(49): 2'O-Methyl Cytosine
  modified_base (50)..(51): gm
  modified_base (52)..(52): um
  modified_base (53)..(53): 2'O-Methyl Adenosine
  modified_base (54)..(54): gm
  modified_base (55)..(55): 2'O-Methyl Adenosine
  modified_base (56)..(57): um
  modified_base (58)..(58): 2'O-Methyl Adenosine
  modified_base (59)..(59): um
  modified_base (60)..(62): 2' Fluoro Guanosine
  modified_base (63)..(63): 2'O-Methyl Cytosine
  modified_base (64)..(64): 2'O-Methyl Adenosine
  modified_base (65)..(65): 2' Fluoro Guanosine
  modified_base (66)..(66): um
  modified_base (67)..(67): 2' Fluoro Guanosine
  modified_base (68)..(68): um
  modified_base (69)..(69): 2' Fluoro Guanosine
  modified_base (70)..(70): 2'O-Methyl Adenosine
  modified_base (71)..(72): 2'O-Methyl Cytosine
  modified_base (73)..(73): gm
  modified_base (74)..(74): 2'O-Methyl Cytosine
  modified_base (75)..(75): gm
  modified_base (76)..(77): 2'O-Methyl Cytosine
  modified_base (77)..(77): inverted deoxythymidine incorporated at the 3'  end
ccgcgcggagggguuucauaaucccguuugucguuuuuuuuuuggcgacgguagauuaugggcagugugaccgcgcc

SEQ ID NO: 62 - RNA, 38 nt, Artificial Sequence
  Aptamer
  modified_base (1)..(2): gm
  modified_base (3)..(3): 2'O-Methyl Cytosine
  modified_base (4)..(4): gm
  modified_base (5)..(5): 2'O-Methyl Adenosine
  modified_base (6)..(6): 2'O-Methyl Cytosine
  modified_base (7)..(8): gm
  modified_base (9)..(9): um
  modified_base (9)..(9): 2' Fluoro Guanosine
  modified_base (10)..(10): 2'O-Methyl Adenosine
  modified_base (11)..(11): gm
  modified_base (12)..(12): 2'O-Methyl Adenosine
  modified_base (13)..(14): um
  modified_base (13)..(14): 2' Fluoro Guanosine
  modified_base (15)..(15): 2'O-Methyl Adenosine
  modified_base (16)..(16): um
  modified_base (16)..(16): 2' Fluoro Guanosine
  modified_base (20)..(20): 2'O-Methyl Cytosine
  modified_base (21)..(21): 2'O-Methyl Adenosine
  modified_base (23)..(23): um
  modified_base (23)..(23): 2' Fluoro Guanosine
  modified_base (25)..(25): um
  modified_base (25)..(25): 2' Fluoro Guanosine
  modified_base (27)..(27): 2'O-Methyl Adenosine
  modified_base (28)..(29): 2'O-Methyl Cytosine
  modified_base (30)..(30): gm
  modified_base (31)..(31): 2'O-Methyl Cytosine
  modified_base (32)..(32): gm
  modified_base (33)..(35): 2'O-Methyl Cytosine
  modified_base (36)..(36): gm
  modified_base (37)..(37): 2'O-Methyl Adenosine
  misc_feature (38)..(38): The 2'O-Methyl cytosine is attached  through the linker 1,3-propanediolspacer to 2'O-Methyl cytosine of SEQ ID NO: 393
  modified_base (38)..(38): 2'O-Methyl Cytosine
ggcgacgguagauuaugggcagugugaccgcgcccgac

SEQ ID NO: 63 - RNA, 34 nt, Artificial Sequence; identical to SEQ ID NO: 48
  Aptamer
  modified_base (1)..(2): gm
  modified_base (3)..(3): 2'O-Methyl Cytosine
  modified_base (4)..(4): gm
  modified_base (5)..(5): 2'O-Methyl Adenosine
  modified_base (6)..(6): 2'O-Methyl Cytosine
  modified_base (7)..(8): gm
  modified_base (9)..(9): um
  modified_base (10)..(10): 2'O-Methyl Adenosine
  modified_base (11)..(11): gm
  modified_base (12)..(12): 2'O-Methyl Adenosine
  modified_base (13)..(14): um
  modified_base (15)..(15): 2'O-Methyl Adenosine
  modified_base (16)..(16): um
  modified_base (17)..(19): 2' Fluoro Guanosine
  modified_base (20)..(20): 2'O-Methyl Cytosine
  modified_base (21)..(21): 2'O-Methyl Adenosine
  modified_base (22)..(22): 2' Fluoro Guanosine
  modified_base (23)..(23): um
  modified_base (24)..(24): 2' Fluoro Guanosine
  modified_base (25)..(25): um
  modified_base (26)..(26): 2' Fluoro Guanosine
  modified_base (27)..(27): 2'O-Methyl Adenosine
  modified_base (28)..(29): 2'O-Methyl Cytosine
  modified_base (30)..(30): gm
  modified_base (31)..(31): 2'O-Methyl Cytosine
  modified_base (32)..(32): gm
  modified_base (33)..(34): 2'O-Methyl Cytosine
  misc_feature (34)..(34): The 2'O-Methyl cytosine is attached  through the linker 1,3-propanediolspacer to 2'O-Methyl cytosine of another nucleotide sequence CXAC

SEQ ID NO: 64 - RNA, 34 nt, Artificial Sequence; identical to SEQ ID NO: 48
  Aptamer
  modified_base (1)..(2): gm
  modified_base (3)..(3): 2'O-Methyl Cytosine
  modified_base (4)..(4): gm
  modified_base (5)..(5): 2'O-Methyl Adenosine
  modified_base (6)..(6): 2'O-Methyl Cytosine
  modified_base (7)..(8): gm
  modified_base (9)..(9): um
  modified_base (10)..(10): 2'O-Methyl Adenosine
  modified_base (11)..(11): gm
  modified_base (12)..(12): 2'O-Methyl Adenosine
  modified_base (13)..(14): um
  modified_base (15)..(15): 2'O-Methyl Adenosine
  modified_base (16)..(16): um
  modified_base (17)..(19): 2' Fluoro Guanosine
  modified_base (20)..(20): 2'O-Methyl Cytosine
  modified_base (21)..(21): 2'O-Methyl Adenosine
  modified_base (22)..(22): 2' Fluoro Guanosine
  modified_base (23)..(23): um
  modified_base (24)..(24): 2' Fluoro Guanosine
  modified_base (25)..(25): um
  modified_base (26)..(26): 2' Fluoro Guanosine
  modified_base (27)..(27): 2'O-Methyl Adenosine
  modified_base (28)..(29): 2'O-Methyl Cytosine
  modified_base (30)..(30): gm
  modified_base (31)..(31): 2'O-Methyl Cytosine
  modified_base (32)..(32): gm
  modified_base (33)..(34): 2'O-Methyl Cytosine
  misc_feature (34)..(34): The 2'O-Methyl cytosine is attached  through the linker Hexaethyleneglycol spacer to 2'O-Methyl cytosine of another nucleotide sequence CXAC

SEQ ID NO: 65 - RNA, 43 nt, Artificial Sequence
  Aptamer
  modified_base (1)..(2): gm
  modified_base (3)..(3): 2'O-Methyl Cytosine
  modified_base (4)..(4): gm
  modified_base (5)..(5): 2'O-Methyl Adenosine
  modified_base (6)..(6): 2'O-Methyl Cytosine
  modified_base (7)..(8): gm
  modified_base (9)..(9): um
  modified_base (10)..(10): 2'O-Methyl Adenosine
  modified_base (11)..(11): gm
  modified_base (12)..(12): 2'O-Methyl Adenosine
  modified_base (13)..(14): um
  modified_base (15)..(15): 2'O-Methyl Adenosine
  modified_base (16)..(16): um
  modified_base (17)..(19): 2' Fluoro Guanosine
  modified_base (20)..(20): 2'O-Methyl Cytosine
  modified_base (21)..(21): 2'O-Methyl Adenosine
  modified_base (22)..(22): 2' Fluoro Guanosine
  modified_base (23)..(23): um
  modified_base (24)..(24): 2' Fluoro Guanosine
  modified_base (25)..(25): um
  modified_base (26)..(26): 2' Fluoro Guanosine
  modified_base (27)..(27): 2'O-Methyl Adenosine
  modified_base (28)..(29): 2'O-Methyl Cytosine
  modified_base (30)..(30): gm
  modified_base (31)..(31): 2'O-Methyl Cytosine
  modified_base (32)..(32): gm
  modified_base (33)..(34): 2'O-Methyl Cytosine
  misc_feature (35)..(39): 2'O-Methyl deoxyuridine linker
  modified_base (35)..(39): um
  modified_base (40)..(40): 2'O-Methyl Cytosine
  modified_base (41)..(41): gm
  modified_base (42)..(42): 2'O-Methyl Adenosine
  misc_feature (43)..(43): The 2'O-Methyl cytosine is attached  through the linker 1,3-propanediolspacer to 2'O-Methyl cytosine of SEQ ID NO: 396
  modified_base (43)..(43): 2'O-Methyl Cytosine
ggcgacgguagauuaugggcagugugaccgcgccuuuuucgac

SEQ ID NO: 66 - RNA, 48 nt, Artificial Sequence
  Aptamer
  modified_base (1)..(2): gm
  modified_base (3)..(3): 2'O-Methyl Cytosine
  modified_base (4)..(4): gm
  modified_base (5)..(5): 2'O-Methyl Adenosine
  modified_base (6)..(6): 2'O-Methyl Cytosine
  modified_base (7)..(8): gm
  modified_base (9)..(9): um
  modified_base (10)..(10): 2'O-Methyl Adenosine
  modified_base (11)..(11): gm
  modified_base (12)..(12): 2'O-Methyl Adenosine
  modified_base (13)..(14): um
  modified_base (15)..(15): 2'O-Methyl Adenosine
  modified_base (16)..(16): um
  modified_base (17)..(19): 2' Fluoro Guanosine
  modified_base (20)..(20): 2'O-Methyl Cytosine
  modified_base (21)..(21): 2'O-Methyl Adenosine
  modified_base (22)..(22): 2' Fluoro Guanosine
  modified_base (23)..(23): um
  modified_base (24)..(24): 2' Fluoro Guanosine
  modified_base (25)..(25): um
  modified_base (26)..(26): 2' Fluoro Guanosine
  modified_base (27)..(27): 2'O-Methyl Adenosine
  modified_base (28)..(29): 2'O-Methyl Cytosine
  modified_base (30)..(30): gm
  modified_base (31)..(31): 2'O-Methyl Cytosine
  modified_base (32)..(32): gm
  modified_base (33)..(34): 2'O-Methyl Cytosine
  modified_base (35)..(44): 2'O-Methyl deoxyuridine
  misc_feature (35)..(44): 2'O-Methyl deoxyuridine linker
  misc_feature (48)..(48): The 2'O-Methyl cytosine is attached  through the linker 1,3-propanediolspacer to 2'O-Methyl cytosine of SEQ ID NO: 397
ggcgacgguagauuaugggcagugugaccgcgccuuuuuuuuuucgac

SEQ ID NO: 67 - RNA, 35 nt, Artificial Sequence
  Aptamer
  misc_feature (1)..(1): The 2'O-Methyl cytosine is attached  through the linker 1,3-propanediolspacer to 2'O-Methyl cytosine of another nucleotide sequence XCCXAC
  modified_base (1)..(2): 2'O-Methyl Cytosine
  modified_base (3)..(3): 2' Fluoro Guanosine
  modified_base (4)..(4): 2'O-Methyl Cytosine
  modified_base (5)..(5): 2' Fluoro Guanosine
  modified_base (6)..(6): 2'O-Methyl Cytosine
  modified_base (7)..(8): 2' Fluoro Guanosine
  modified_base (9)..(9): 2'O-Methyl Adenosine
  modified_base (10)..(12): 2' Fluoro Guanosine
  modified_base (13)..(13): gm
  modified_base (14)..(16): um
  modified_base (17)..(17): 2'O-Methyl Cytosine
  modified_base (18)..(18): 2'O-Methyl Adenosine
  modified_base (19)..(19): um
  modified_base (20)..(21): 2'O-Methyl Adenosine
  modified_base (22)..(22): um
  modified_base (23)..(25): 2'O-Methyl Cytosine
  modified_base (26)..(26): 2' Fluoro Guanosine
  modified_base (27)..(29): um
  modified_base (30)..(30): gm
  modified_base (31)..(31): um
  modified_base (32)..(32): 2'O-Methyl Cytosine
  modified_base (33)..(34): gm
  modified_base (35)..(35): inverted deoxythymidine incorporated at the 3'  end
  modified_base (35)..(35): 2'O-Methyl Cytosine
ccgcgcggagggguuucauaaucccguuugucggc

SEQ ID NO: 68 - RNA, 69 nt, Artificial Sequence
  Aptamer
  misc_feature (1)..(1): The 2'O-Methyl cytosine is attached  through the linker 1,3-propanediolspacer to 2'O-Methyl cytosine of another nucleotide sequence XCCXAC.
  modified_base (1)..(2): 2'O-Methyl Cytosine
  modified_base (3)..(3): 2' Fluoro Guanosine
  modified_base (4)..(4): 2'O-Methyl Cytosine
  modified_base (5)..(5): 2' Fluoro Guanosine
  modified_base (6)..(6): 2'O-Methyl Cytosine
  modified_base (7)..(8): 2' Fluoro Guanosine
  modified_base (9)..(9): 2'O-Methyl Adenosine
  modified_base (10)..(12): 2' Fluoro Guanosine
  modified_base (13)..(25): 2'O-Methyl Cytosine
  modified_base (13)..(13): gm
  modified_base (14)..(16): um
  modified_base (17)..(17): 2'O-Methyl Cytosine
  modified_base (18)..(18): 2'O-Methyl Adenosine
  modified_base (19)..(19): um
  modified_base (20)..(21): 2'O-Methyl Adenosine
  modified_base (22)..(22): um
  modified_base (26)..(26): 2' Fluoro Guanosine
  modified_base (27)..(29): um
  modified_base (30)..(30): gm
  modified_base (31)..(31): um
  modified_base (32)..(32): 2'O-Methyl Cytosine
  modified_base (33)..(34): gm
  modified_base (35)..(35): 2'O-Methyl Cytosine
  modified_base (36)..(37): gm
  modified_base (38)..(38): 2'O-Methyl Cytosine
  modified_base (39)..(39): gm
  modified_base (40)..(40): 2'O-Methyl Adenosine
  modified_base (41)..(41): 2'O-Methyl Cytosine
  modified_base (42)..(43): gm
  modified_base (44)..(44): um
  modified_base (45)..(45): 2'O-Methyl Adenosine
  modified_base (46)..(46): gm
  modified_base (47)..(47): 2'O-Methyl Adenosine
  modified_base (48)..(49): um
  modified_base (50)..(50): 2'O-Methyl Adenosine
  modified_base (51)..(51): um
  modified_base (52)..(54): 2' Fluoro Guanosine
  modified_base (55)..(55): 2'O-Methyl Cytosine
  modified_base (56)..(56): 2'O-Methyl Adenosine
  modified_base (57)..(57): 2' Fluoro Guanosine
  modified_base (58)..(58): um
  modified_base (59)..(59): 2' Fluoro Guanosine
  modified_base (60)..(60): um
  modified_base (61)..(61): 2' Fluoro Guanosine
  modified_base (62)..(62): 2'O-Methyl Adenosine
  modified_base (63)..(64): 2'O-Methyl Cytosine
  modified_base (65)..(65): gm
  modified_base (66)..(66): 2'O-Methyl Cytosine
  modified_base (67)..(67): gm
  modified_base (68)..(69): 2'O-Methyl Cytosine
  misc_feature (69)..(69): inverted deoxythymidine incorporated at the 3'  end
ccgcgcggagggguuucauaaucccguuugucggcggcgacgguagauuaugggcagugugaccgcgcc

SEQ ID NO: 69 - RNA, 35 nt, Artificial Sequence; identical to SEQ ID NO: 67
  Aptamer
  misc_feature (1)..(1): The 2'O-Methyl cytosine is attached  through the linker 1,3-propanediolspacer to 2'O-Methyl cytosine of another nucleotide sequence XCCXAC.
  modified_base (1)..(2): 2'O-Methyl Cytosine
  modified_base (3)..(3): 2' Fluoro Guanosine
  modified_base (4)..(4): 2'O-Methyl Cytosine
  modified_base (5)..(5): 2' Fluoro Guanosine
  modified_base (6)..(6): 2'O-Methyl Cytosine
  modified_base (7)..(8): 2' Fluoro Guanosine
  modified_base (9)..(9): 2'O-Methyl Adenosine
  modified_base (10)..(12): 2' Fluoro Guanosine
  modified_base (13)..(13): gm
  modified_base (14)..(16): um
  modified_base (17)..(17): 2'O-Methyl Cytosine
  modified_base (18)..(18): 2'O-Methyl Adenosine
  modified_base (19)..(19): um
  modified_base (20)..(21): 2'O-Methyl Adenosine
  modified_base (22)..(22): um
  modified_base (23)..(25): 2'O-Methyl Cytosine
  modified_base (26)..(26): 2' Fluoro Guanosine
  modified_base (27)..(29): um
  modified_base (30)..(30): gm
  modified_base (31)..(31): um
  modified_base (32)..(32): 2'O-Methyl Cytosine
  modified_base (33)..(34): gm
  misc_feature (35)..(35): The 2'O-Methyl cytosine is attached  through the linker 1,3-propanediolspacer to 2'O-Methyl guanosine of SEQ ID NO: 398
  modified_base (35)..(35): 2'O-Methyl Cytosine

SEQ ID NO: 70 - RNA, 35 nt, Artificial Sequence; identical to SEQ ID NO: 67
  Aptamer
  misc_feature (1)..(1): The 2'O-Methyl cytosine is attached  through the linker 1,3-propanediolspacer to 2'O-Methyl cytosine of another nucleotide sequence XCCXAC
  modified_base (1)..(2): 2'O-Methyl Cytosine
  modified_base (3)..(3): 2' Fluoro Guanosine
  modified_base (4)..(4): 2'O-Methyl Cytosine
  modified_base (5)..(5): 2' Fluoro Guanosine
  modified_base (6)..(6): 2'O-Methyl Cytosine
  modified_base (7)..(8): 2' Fluoro Guanosine
  modified_base (9)..(9): 2'O-Methyl Adenosine
  modified_base (10)..(12): 2' Fluoro Guanosine
  modified_base (13)..(13): gm
  modified_base (14)..(16): um
  modified_base (17)..(17): 2'O-Methyl Cytosine
  modified_base (18)..(18): 2'O-Methyl Adenosine
  modified_base (19)..(19): um
  modified_base (20)..(21): 2'O-Methyl Adenosine
  modified_base (22)..(22): um
  modified_base (23)..(25): 2'O-Methyl Cytosine
  modified_base (26)..(26): 2' Fluoro Guanosine
  modified_base (27)..(29): um
  modified_base (30)..(30): gm
  modified_base (31)..(31): um
  modified_base (32)..(32): 2'O-Methyl Cytosine
  modified_base (33)..(34): gm
  misc_feature (35)..(35): The 2'O-Methyl cytosine is attached through the linker Hexaethylene glycol spacer to 2'O-Methyl guanosine of SEQ ID NO:399
  modified_base (35)..(35): 2'O-Methyl Cytosine

SEQ ID NO: 71 - RNA, 74 nt, Artificial Sequence
  Aptamer
  misc_feature (1)..(1): The 2'O-Methyl cytosine is attached  through the linker 1,3-propanediolspacer to 2'O-Methyl cytosine of another nucleotide sequence XCCXAC
  modified_base (1)..(2): 2'O-Methyl Cytosine
  modified_base (3)..(3): 2' Fluoro Guanosine
  modified_base (4)..(4): 2'O-Methyl Cytosine
  modified_base (5)..(5): 2' Fluoro Guanosine
  modified_base (6)..(6): 2'O-Methyl Cytosine
  modified_base (7)..(8): 2' Fluoro Guanosine
  modified_base (9)..(9): 2'O-Methyl Adenosine
  modified_base (10)..(12): 2' Fluoro Guanosine
  modified_base (13)..(13): gm
  modified_base (14)..(16): um
  modified_base (17)..(17): 2'O-Methyl Cytosine
  modified_base (18)..(18): 2'O-Methyl Adenosine
  modified_base (19)..(19): um
  modified_base (20)..(21): 2'O-Methyl Adenosine
  modified_base (22)..(22): um
  modified_base (23)..(25): 2'O-Methyl Cytosine
  modified_base (26)..(26): 2' Fluoro Guanosine
  modified_base (27)..(29): um
  modified_base (30)..(30): gm
  modified_base (31)..(31): um
  modified_base (32)..(32): 2'O-Methyl Cytosine
  modified_base (33)..(34): gm
  modified_base (35)..(35): 2'O-Methyl Cytosine
  misc_feature (36)..(40): 2'O-Methyl deoxyuridine linker
  modified_base (36)..(40): 2'O-Methyl deoxyuridine
  modified_base (41)..(42): gm
  modified_base (43)..(43): 2'O-Methyl Cytosine
  modified_base (44)..(44): gm
  modified_base (45)..(45): 2'O-Methyl Adenosine
  modified_base (46)..(46): 2'O-Methyl Cytosine
  modified_base (47)..(48): gm
  modified_base (49)..(49): um
  modified_base (50)..(50): 2'O-Methyl Adenosine
  modified_base (51)..(51): gm
  modified_base (52)..(52): 2'O-Methyl Adenosine
  modified_base (53)..(54): um
  modified_base (55)..(55): 2'O-Methyl Adenosine
  modified_base (56)..(56): um
  modified_base (57)..(59): 2' Fluoro Guanosine
  modified_base (60)..(60): 2'O-Methyl Cytosine
  modified_base (61)..(61): 2'O-Methyl Adenosine
  modified_base (62)..(62): 2' Fluoro Guanosine
  modified_base (63)..(63): um
  modified_base (64)..(64): 2' Fluoro Guanosine
  modified_base (65)..(65): um
  modified_base (66)..(66): 2' Fluoro Guanosine
  modified_base (67)..(67): 2'O-Methyl Adenosine
  modified_base (68)..(69): 2'O-Methyl Cytosine
  modified_base (70)..(70): gm
  modified_base (71)..(71): 2'O-Methyl Cytosine
  modified_base (72)..(72): gm
  modified_base (73)..(74): 2'O-Methyl Cytosine
  misc_feature (74)..(74): inverted deoxythymidine incorporated at the 3'  end
ccgcgcggagggguuucauaaucccguuugucggcuuuuuggcgacgguagauuaugggcagugugaccgcgcc

SEQ ID NO: 72 - RNA, 79 nt, Artificial Sequence
  Aptamer
  misc_feature (1)..(1): The 2'O-Methyl cytosine is attached  through the linker 1,3-propanediolspacer to 2'O-Methyl cytosine of another nucleotide sequence XCCXAC.
  modified_base (1)..(2): 2'O-Methyl Cytosine
  modified_base (3)..(3): 2' Fluoro Guanosine
  modified_base (4)..(4): 2'O-Methyl Cytosine
  modified_base (5)..(5): 2' Fluoro Guanosine
  modified_base (6)..(6): 2'O-Methyl Cytosine
  modified_base (7)..(8): 2' Fluoro Guanosine
  modified_base (9)..(9): 2'O-Methyl Adenosine
  modified_base (10)..(12): 2' Fluoro Guanosine
  modified_base (13)..(13): gm
  modified_base (14)..(16): um
  modified_base (17)..(17): 2'O-Methyl Cytosine
  modified_base (18)..(18): 2'O-Methyl Adenosine
  modified_base (19)..(19): um
  modified_base (20)..(21): 2'O-Methyl Adenosine
  modified_base (22)..(22): um
  modified_base (23)..(25): 2'O-Methyl Cytosine
  modified_base (26)..(26): 2' Fluoro Guanosine
  modified_base (27)..(29): um
  modified_base (30)..(30): gm
  modified_base (31)..(31): um
  modified_base (32)..(32): 2'O-Methyl Cytosine
  modified_base (33)..(34): gm
  modified_base (35)..(35): 2'O-Methyl Cytosine
  misc_feature (36)..(45): 2'O-Methyl deoxyuridine linker
  modified_base (36)..(45): 2'O-Methyl deoxyuridine
  modified_base (46)..(47): gm
  modified_base (48)..(48): 2'O-Methyl Cytosine
  modified_base (49)..(49): gm
  modified_base (50)..(50): 2'O-Methyl Adenosine
  modified_base (51)..(51): 2'O-Methyl Cytosine
  modified_base (52)..(53): gm
  modified_base (54)..(54): um
  modified_base (55)..(55): 2'O-Methyl Adenosine
  modified_base (56)..(56): gm
  modified_base (57)..(57): 2'O-Methyl Adenosine
  modified_base (58)..(59): um
  modified_base (60)..(60): 2'O-Methyl Adenosine
  modified_base (61)..(61): um
  modified_base (62)..(64): 2' Fluoro Guanosine
  modified_base (65)..(65): 2'O-Methyl Cytosine
  modified_base (66)..(66): 2'O-Methyl Adenosine
  modified_base (67)..(67): 2' Fluoro Guanosine
  modified_base (68)..(68): um
  modified_base (69)..(69): 2' Fluoro Guanosine
  modified_base (70)..(70): um
  modified_base (71)..(71): 2' Fluoro Guanosine
  modified_base (72)..(72): 2'O-Methyl Adenosine
  modified_base (73)..(74): 2'O-Methyl Cytosine
  modified_base (75)..(75): gm
  modified_base (76)..(76): 2'O-Methyl Cytosine
  modified_base (77)..(77): gm
  modified_base (78)..(79): 2'O-Methyl Cytosine
  modified_base (79)..(79): inverted deoxythymidine incorporated at the 3'  end
ccgcgcggagggguuucauaaucccguuugucggcuuuuuuuuuuggcgacgguagauuaugggcagugugaccgcgcc

SEQ ID NO: 73 - RNA, 40 nt, Artificial Sequence
  Aptamer
  modified_base (1)..(2): gm
  modified_base (3)..(3): 2'O-Methyl Cytosine
  modified_base (4)..(4): gm
  modified_base (5)..(5): 2'O-Methyl Adenosine
  modified_base (6)..(6): 2'O-Methyl Cytosine
  modified_base (7)..(8): gm
  modified_base (9)..(9): um
  modified_base (10)..(10): 2'O-Methyl Adenosine
  modified_base (11)..(11): gm
  modified_base (12)..(12): 2'O-Methyl Adenosine
  modified_base (13)..(14): um
  modified_base (15)..(15): 2'O-Methyl Adenosine
  modified_base (16)..(16): um
  modified_base (17)..(19): 2' Fluoro Guanosine
  modified_base (20)..(20): 2'O-Methyl Cytosine
  modified_base (21)..(21): 2'O-Methyl Adenosine
  modified_base (22)..(22): 2' Fluoro Guanosine
  modified_base (23)..(23): um
  modified_base (24)..(24): 2' Fluoro Guanosine
  modified_base (25)..(25): um
  modified_base (26)..(26): 2' Fluoro Guanosine
  modified_base (27)..(27): 2'O-Methyl Adenosine
  modified_base (28)..(29): 2'O-Methyl Cytosine
  modified_base (30)..(30): gm
  modified_base (31)..(31): 2'O-Methyl Cytosine
  modified_base (32)..(32): gm
  modified_base (33)..(34): 2'O-Methyl Cytosine
  modified_base (35)..(35): gm
  modified_base (36)..(37): 2'O-Methyl Cytosine
  modified_base (38)..(38): gm
  modified_base (39)..(39): 2'O-Methyl Adenosine
  misc_feature (40)..(40): The 2'O-Methyl cytosine is attached  through the linker 1,3-propanediolspacer to 2'O-Methyl cytosine of SEQ ID NO: 400
  misc_feature (40)..(40): The 2'O-Methyl cytosine is attached  through the linker 1,3-propanediolspacer to 2'O-Methyl cytosine of SEQ ID NO: 302
  modified_base (40)..(40): 2'O-Methyl Cytosine
ggcgacgguagauuaugggcagugugaccgcgccgccgac

SEQ ID NO: 74 - RNA, 34 nt, Artificial Sequence; identical to SEQ ID NO: 48
  Aptamer
  modified_base (1)..(2): gm
  modified_base (3)..(3): 2'O-Methyl Cytosine
  modified_base (4)..(4): gm
  modified_base (5)..(5): 2'O-Methyl Adenosine
  modified_base (6)..(6): 2'O-Methyl Cytosine
  modified_base (7)..(8): gm
  modified_base (9)..(9): um
  modified_base (10)..(10): 2'O-Methyl Adenosine
  modified_base (11)..(11): gm
  modified_base (12)..(12): 2'O-Methyl Adenosine
  modified_base (13)..(14): um
  modified_base (15)..(15): 2'O-Methyl Adenosine
  modified_base (16)..(16): um
  modified_base (17)..(19): 2' Fluoro Guanosine
  modified_base (20)..(20): 2'O-Methyl Cytosine
  modified_base (21)..(21): 2'O-Methyl Adenosine
  modified_base (22)..(22): 2' Fluoro Guanosine
  modified_base (23)..(23): um
  modified_base (24)..(24): 2' Fluoro Guanosine
  modified_base (25)..(25): um
  modified_base (26)..(26): 2' Fluoro Guanosine
  modified_base (27)..(27): 2'O-Methyl Adenosine
  modified_base (28)..(29): 2'O-Methyl Cytosine
  modified_base (30)..(30): gm
  modified_base (31)..(31): 2'O-Methyl Cytosine
  modified_base (32)..(32): gm
  modified_base (33)..(34): 2'O-Methyl Cytosine
  misc_feature (34)..(34): The 2'O-Methyl cytosine is attached through the linker 1,3-propanediolspacer to 2'O-Methyl guanosine of another nucleotide sequence XCCXAC.

SEQ ID NO: 75 - RNA, 34 nt, Artificial Sequence; identical to SEQ ID NO: 48
  Aptamer
  modified_base (1)..(2): gm
  modified_base (3)..(3): 2'O-Methyl Cytosine
  modified_base (4)..(4): gm
  modified_base (5)..(5): 2'O-Methyl Adenosine
  modified_base (6)..(6): 2'O-Methyl Cytosine
  modified_base (7)..(8): gm
  modified_base (9)..(9): um
  modified_base (10)..(10): 2'O-Methyl Adenosine
  modified_base (11)..(11): gm
  modified_base (12)..(12): 2'O-Methyl Adenosine
  modified_base (13)..(14): um
  modified_base (15)..(15): 2'O-Methyl Adenosine
  modified_base (16)..(16): um
  modified_base (17)..(19): 2' Fluoro Guanosine
  modified_base (20)..(20): 2'O-Methyl Cytosine
  modified_base (21)..(21): 2'O-Methyl Adenosine
  modified_base (22)..(22): 2' Fluoro Guanosine
  modified_base (23)..(23): um
  modified_base (24)..(24): 2' Fluoro Guanosine
  modified_base (25)..(25): um
  modified_base (26)..(26): 2' Fluoro Guanosine
  modified_base (27)..(27): 2'O-Methyl Adenosine
  modified_base (28)..(29): 2'O-Methyl Cytosine
  modified_base (30)..(30): gm
  modified_base (31)..(31): 2'O-Methyl Cytosine
  modified_base (32)..(32): gm
  modified_base (33)..(34): 2'O-Methyl Cytosine
  misc_feature (34)..(34): The 2'O-Methyl cytosine is attached  through the linker Hexaethyleneglycol spacer to 2'O-Methyl guanosine of another nucleotide sequence XCCXAC

SEQ ID NO: 76 - RNA, 45 nt, Artificial Sequence
  Aptamer
  modified_base (1)..(2): gm
  modified_base (3)..(3): 2'O-Methyl Cytosine
  modified_base (4)..(4): gm
  modified_base (5)..(5): 2'O-Methyl Adenosine
  modified_base (6)..(6): 2'O-Methyl Cytosine
  modified_base (7)..(8): gm
  modified_base (9)..(9): um
  modified_base (10)..(10): 2'O-Methyl Adenosine
  modified_base (11)..(11): gm
  modified_base (12)..(12): 2'O-Methyl Adenosine
  modified_base (13)..(14): um
  modified_base (15)..(15): 2'O-Methyl Adenosine
  modified_base (16)..(16): um
  modified_base (17)..(19): 2' Fluoro Guanosine
  modified_base (20)..(20): 2'O-Methyl Cytosine
  modified_base (21)..(21): 2'O-Methyl Adenosine
  modified_base (22)..(22): 2' Fluoro Guanosine
  modified_base (23)..(23): um
  modified_base (24)..(24): 2' Fluoro Guanosine
  modified_base (25)..(25): um
  modified_base (26)..(26): 2' Fluoro Guanosine
  modified_base (27)..(27): 2'O-Methyl Adenosine
  modified_base (28)..(29): 2'O-Methyl Cytosine
  modified_base (30)..(30): gm
  modified_base (31)..(31): 2'O-Methyl Cytosine
  modified_base (32)..(32): gm
  modified_base (33)..(34): 2'O-Methyl Cytosine
  misc_feature (35)..(39): 2'O-Methyl deoxyuridine linker
  modified_base (35)..(39): 2'O-Methyl deoxyuridine
  modified_base (40)..(40): gm
  modified_base (41)..(42): 2'O-Methyl Cytosine
  modified_base (43)..(43): gm
  modified_base (44)..(44): 2'O-Methyl Adenosine
  misc_feature (45)..(45): The 2'O-Methyl cytosine is attached  through the linker 1,3-propanediolspacer to 2'O-Methyl cytosine of SEQ ID NO: 403
  misc_feature (45)..(45): The 2'O-Methyl cytosine is attached through the linker 1,3-propanediolspacer to 2'O-Methyl cytosine of SEQ ID NO:302
  modified_base (45)..(45): 2'O-Methyl Cytosine
ggcgacgguagauuaugggcagugugaccgcgccuuuuugccgac

SEQ ID NO: 77 - RNA, 50 nt, Artificial Sequence
  Aptamer
  modified_base (1)..(2): gm
  modified_base (3)..(3): 2'O-Methyl Cytosine
  modified_base (4)..(4): gm
  modified_base (5)..(5): 2'O-Methyl Adenosine
  modified_base (6)..(6): 2'O-Methyl Cytosine
  modified_base (7)..(8): gm
  modified_base (9)..(9): um
  modified_base (10)..(10): 2'O-Methyl Adenosine
  modified_base (11)..(11): gm
  modified_base (12)..(12): 2'O-Methyl Adenosine
  modified_base (13)..(14): um
  modified_base (15)..(15): 2'O-Methyl Adenosine
  modified_base (16)..(16): um
  modified_base (17)..(19): 2' Fluoro Guanosine
  modified_base (20)..(20): 2'O-Methyl Cytosine
  modified_base (21)..(21): 2'O-Methyl Adenosine
  modified_base (22)..(22): 2' Fluoro Guanosine
  modified_base (23)..(23): um
  modified_base (24)..(24): 2' Fluoro Guanosine
  modified_base (25)..(25): um
  modified_base (26)..(26): 2' Fluoro Guanosine
  modified_base (27)..(27): 2'O-Methyl Adenosine
  modified_base (28)..(29): 2'O-Methyl Cytosine
  modified_base (30)..(30): gm
  modified_base (31)..(31): 2'O-Methyl Cytosine
  modified_base (32)..(32): gm
  modified_base (33)..(34): 2'O-Methyl Cytosine
  misc_feature (35)..(44): 2'O-Methyl deoxyuridine linker
  modified_base (35)..(44): 2'O-Methyl deoxyuridine
  modified_base (45)..(45): gm
  modified_base (46)..(47): 2'O-Methyl Cytosine
  modified_base (48)..(48): gm
  modified_base (49)..(49): 2'O-Methyl Adenosine
  misc_feature (50)..(50): The 2'O-Methyl cytosine is attached  through the linker 1,3-propanediolspacer to 2'O-Methyl cytosine of SEQ ID NO: 404
  misc_feature (50)..(50): The 2'O-Methyl cytosine is attached through the linker 1,3-propanediolspacer to 2'O-Methyl cytosine of SEQ ID NO:302
  modified_base (50)..(50): 2'O-Methyl Cytosine
ggcgacgguagauuaugggcagugugaccgcgccuuuuuuuuuugccgac

SEQ ID NO: 78 - RNA, 38 nt, Artificial Sequence
  Aptamer
  modified_base (1)..(1): gm
  modified_base (2)..(2): 2'O-Methyl Cytosine
  modified_base (3)..(4): gm
  modified_base (5)..(5): 2'O-Methyl Cytosine
  modified_base (6)..(6): gm
  modified_base (7)..(7): 2'O-Methyl Adenosine
  modified_base (8)..(8): 2'O-Methyl Cytosine
  modified_base (9)..(10): gm
  modified_base (11)..(11): um
  modified_base (12)..(12): 2'O-Methyl Adenosine
  modified_base (13)..(13): gm
  modified_base (14)..(14): 2'O-Methyl Adenosine
  modified_base (15)..(16): um
  modified_base (17)..(17): 2'O-Methyl Adenosine
  modified_base (18)..(18): um
  modified_base (19)..(21): 2' Fluoro Guanosine
  modified_base (22)..(22): 2'O-Methyl Cytosine
  modified_base (23)..(23): 2'O-Methyl Adenosine
  modified_base (24)..(24): 2' Fluoro Guanosine
  modified_base (25)..(25): um
  modified_base (26)..(26): 2' Fluoro Guanosine
  modified_base (27)..(27): um
  modified_base (28)..(28): 2' Fluoro Guanosine
  modified_base (29)..(29): 2'O-Methyl Adenosine
  modified_base (30)..(31): 2'O-Methyl Cytosine
  modified_base (32)..(32): gm
  modified_base (33)..(33): 2'O-Methyl Cytosine
  modified_base (34)..(34): gm
  modified_base (35)..(36): 2'O-Methyl Cytosine
  modified_base (37)..(37): gm
  modified_base (38)..(38): inverted deoxythymidine incorporated at the 3'  end
  modified_base (38)..(38): 2'O-Methyl Cytosine
gcggcgacgguagauuaugggcagugugaccgcgccgc

SEQ ID NO: 79 - RNA, 71 nt, Artificial Sequence
  Aptamer
  misc_feature (1)..(1): The 2'O-Methyl cytosine is attached  through the linker 1,3-propanediolspacer to 2'O-Methyl cytosine of another nucleotide sequence CXAC.
  modified_base (1)..(2): 2'O-Methyl Cytosine
  modified_base (3)..(3): 2' Fluoro Guanosine
  modified_base (4)..(4): 2'O-Methyl Cytosine
  modified_base (5)..(5): 2' Fluoro Guanosine
  modified_base (6)..(6): 2'O-Methyl Cytosine
  modified_base (7)..(8): 2' Fluoro Guanosine
  modified_base (9)..(9): 2'O-Methyl Adenosine
  modified_base (10)..(12): 2' Fluoro Guanosine
  modified_base (13)..(13): gm
  modified_base (14)..(16): um
  modified_base (17)..(17): 2'O-Methyl Cytosine
  modified_base (18)..(18): 2'O-Methyl Adenosine
  modified_base (19)..(19): um
  modified_base (20)..(21): 2'O-Methyl Adenosine
  modified_base (22)..(22): um
  modified_base (23)..(25): 2'O-Methyl Cytosine
  modified_base (26)..(26): 2' Fluoro Guanosine
  modified_base (27)..(29): um
  modified_base (30)..(30): gm
  modified_base (31)..(31): um
  modified_base (32)..(32): 2'O-Methyl Cytosine
  modified_base (33)..(34): gm
  modified_base (35)..(35): 2'O-Methyl Cytosine
  modified_base (36)..(37): gm
  modified_base (38)..(38): 2'O-Methyl Cytosine
  modified_base (39)..(39): gm
  modified_base (40)..(40): 2'O-Methyl Adenosine
  modified_base (41)..(41): 2'O-Methyl Cytosine
  modified_base (42)..(43): gm
  modified_base (44)..(44): um
  modified_base (45)..(45): 2'O-Methyl Adenosine
  modified_base (46)..(46): gm
  modified_base (47)..(47): 2'O-Methyl Adenosine
  modified_base (48)..(49): um
  modified_base (50)..(50): 2'O-Methyl Adenosine
  modified_base (51)..(51): um
  modified_base (52)..(54): 2' Fluoro Guanosine
  modified_base (55)..(55): 2'O-Methyl Cytosine
  modified_base (56)..(56): 2'O-Methyl Adenosine
  modified_base (57)..(57): 2' Fluoro Guanosine
  modified_base (58)..(58): um
  modified_base (59)..(59): 2' Fluoro Guanosine
  modified_base (60)..(60): um
  modified_base (61)..(61): 2' Fluoro Guanosine
  modified_base (62)..(62): 2'O-Methyl Adenosine
  modified_base (63)..(64): 2'O-Methyl Cytosine
  modified_base (65)..(65): gm
  modified_base (66)..(66): 2'O-Methyl Cytosine
  modified_base (67)..(67): gm
  modified_base (68)..(69): 2'O-Methyl Cytosine
  modified_base (70)..(70): gm
  modified_base (71)..(71): inverted deoxythymidine incorporated at the 3'  end
  modified_base (71)..(71): 2'O-Methyl Cytosine
ccgcgcggagggguuucauaaucccguuugucggcggcgacgguagauuaugggcagugugaccgcgccgc

SEQ ID NO: 80 - RNA, 33 nt, Artificial Sequence; identical to SEQ ID NO: 1
  Aptamer
  misc_feature (1)..(1): The 2'O-Methyl cytosine is attached  through the linker 1,3-propanediolspacer to 2'O-Methyl cytosine of another nucleotide sequence CXAC.
  modified_base (1)..(2): 2'O-Methyl Cytosine
  modified_base (3)..(3): 2' Fluoro Guanosine
  modified_base (4)..(4): 2'O-Methyl Cytosine
  modified_base (5)..(5): 2' Fluoro Guanosine
  modified_base (6)..(6): 2'O-Methyl Cytosine
  modified_base (7)..(8): 2' Fluoro Guanosine
  modified_base (9)..(9): 2'O-Methyl Adenosine
  modified_base (10)..(12): 2' Fluoro Guanosine
  modified_base (13)..(13): gm
  modified_base (14)..(16): um
  modified_base (17)..(17): 2'O-Methyl Cytosine
  modified_base (18)..(18): 2'O-Methyl Adenosine
  modified_base (19)..(19): um
  modified_base (20)..(21): 2'O-Methyl Adenosine
  modified_base (22)..(22): um
  modified_base (23)..(25): 2'O-Methyl Cytosine
  modified_base (26)..(26): 2' Fluoro Guanosine
  modified_base (27)..(29): um
  modified_base (30)..(30): gm
  modified_base (31)..(31): um
  modified_base (32)..(32): 2'O-Methyl Cytosine
  misc_feature (33)..(33): The 2'O-Methyl guanosine is attached  through the linker 1,3-propanediolspacer to 2'O-Methyl guanosine of SEQ ID NO: 405
  modified_base (33)..(33): gm

SEQ ID NO: 81 - RNA, 33 nt, Artificial Sequence; identical to SEQ ID NO: 1
  Aptamer
  misc_feature (1)..(1): The 2'O-Methyl cytosine is attached  through the linker 1,3-propanediolspacer to 2'O-Methyl cytosine of another nucleotide sequence CXAC.
  modified_base (1)..(2): 2'O-Methyl Cytosine
  modified_base (3)..(3): 2' Fluoro Guanosine
  modified_base (4)..(4): 2'O-Methyl Cytosine
  modified_base (5)..(5): 2' Fluoro Guanosine
  modified_base (6)..(6): 2'O-Methyl Cytosine
  modified_base (7)..(8): 2' Fluoro Guanosine
  modified_base (9)..(9): 2'O-Methyl Adenosine
  modified_base (10)..(12): 2' Fluoro Guanosine
  modified_base (13)..(13): gm
  modified_base (14)..(16): um
  modified_base (17)..(17): 2'O-Methyl Cytosine
  modified_base (18)..(18): 2'O-Methyl Adenosine
  modified_base (19)..(19): um
  modified_base (20)..(21): 2'O-Methyl Adenosine
  modified_base (22)..(22): um
  modified_base (23)..(25): 2'O-Methyl Cytosine
  modified_base (26)..(26): 2' Fluoro Guanosine
  modified_base (27)..(29): um
  modified_base (30)..(30): gm
  modified_base (31)..(31): um
  modified_base (32)..(32): 2'O-Methyl Cytosine
  misc_feature (33)..(33): The 2'O-Methyl guanosine is attached through the linker Hexaethyleneglycol spacer to 2'O-Methyl guanosine of  SEQ ID NO: 406
  modified_base (33)..(33): gm

SEQ ID NO: 82 - RNA, 76 nt, Artificial Sequence
  Aptamer
  misc_feature (1)..(1): The 2'O-Methyl cytosine is attached  through the linker 1,3-propanediolspacer to 2'O-Methyl cytosine of another nucleotide sequence CXAC
  modified_base (1)..(2): 2'O-Methyl Cytosine
  modified_base (3)..(3): 2' Fluoro Guanosine
  modified_base (4)..(4): 2'O-Methyl Cytosine
  modified_base (5)..(5): 2' Fluoro Guanosine
  modified_base (6)..(6): 2'O-Methyl Cytosine
  modified_base (7)..(8): 2' Fluoro Guanosine
  modified_base (9)..(9): 2'O-Methyl Adenosine
  modified_base (10)..(12): 2' Fluoro Guanosine
  modified_base (13)..(13): gm
  modified_base (14)..(16): um
  modified_base (17)..(17): 2'O-Methyl Cytosine
  modified_base (18)..(18): 2'O-Methyl Adenosine
  modified_base (19)..(19): um
  modified_base (20)..(21): 2'O-Methyl Adenosine
  modified_base (22)..(22): um
  modified_base (23)..(25): 2'O-Methyl Cytosine
  modified_base (26)..(26): 2' Fluoro Guanosine
  modified_base (27)..(29): um
  modified_base (30)..(30): gm
  modified_base (31)..(31): um
  modified_base (32)..(32): 2'O-Methyl Cytosine
  modified_base (33)..(33): gm
  misc_feature (34)..(38): 2'O-Methyl deoxyuridine linker
  modified_base (34)..(38): 2'O-Methyl deoxyuridine
  modified_base (39)..(39): gm
  modified_base (40)..(40): 2'O-Methyl Cytosine
  modified_base (41)..(42): gm
  modified_base (43)..(43): 2'O-Methyl Cytosine
  modified_base (44)..(44): gm
  modified_base (45)..(45): 2'O-Methyl Adenosine
  modified_base (46)..(46): 2'O-Methyl Cytosine
  modified_base (47)..(48): gm
  modified_base (49)..(49): um
  modified_base (50)..(50): 2'O-Methyl Adenosine
  modified_base (51)..(51): gm
  modified_base (52)..(52): 2'O-Methyl Adenosine
  modified_base (53)..(54): um
  modified_base (55)..(55): 2'O-Methyl Adenosine
  modified_base (56)..(56): um
  modified_base (57)..(59): 2' Fluoro Guanosine
  modified_base (60)..(60): 2'O-Methyl Cytosine
  modified_base (61)..(61): 2'O-Methyl Adenosine
  modified_base (62)..(62): 2' Fluoro Guanosine
  modified_base (63)..(63): um
  modified_base (64)..(64): 2' Fluoro Guanosine
  modified_base (65)..(65): um
  modified_base (66)..(66): 2' Fluoro Guanosine
  modified_base (67)..(67): 2'O-Methyl Adenosine
  modified_base (68)..(69): 2'O-Methyl Cytosine
  modified_base (70)..(70): gm
  modified_base (71)..(71): 2'O-Methyl Cytosine
  modified_base (72)..(72): gm
  modified_base (73)..(74): 2'O-Methyl Cytosine
  modified_base (75)..(75): gm
  modified_base (76)..(76): inverted deoxythymidine incorporated at the 3'  end
  modified_base (76)..(76): 2'O-Methyl Cytosine
ccgcgcggagggguuucauaaucccguuugucguuuuugcggcgacgguagauuaugggcagugugaccgcgccgc

SEQ ID NO: 83 - RNA, 81 nt, Artificial Sequence
  Aptamer
  misc_feature (1)..(1): The 2'O-Methyl cytosine is attached  through the linker 1,3-propanediolspacer to 2'O-Methyl cytosine of another nucleotide sequence CXAC
  modified_base (1)..(2): 2'O-Methyl Cytosine
  modified_base (3)..(3): 2' Fluoro Guanosine
  modified_base (4)..(4): 2'O-Methyl Cytosine
  modified_base (5)..(5): 2' Fluoro Guanosine
  modified_base (6)..(6): 2'O-Methyl Cytosine
  modified_base (7)..(8): 2' Fluoro Guanosine
  modified_base (9)..(9): 2'O-Methyl Adenosine
  modified_base (10)..(12): 2' Fluoro Guanosine
  modified_base (13)..(13): gm
  modified_base (14)..(16): um
  modified_base (17)..(17): 2'O-Methyl Cytosine
  modified_base (18)..(18): 2'O-Methyl Adenosine
  modified_base (19)..(19): um
  modified_base (20)..(21): 2'O-Methyl Adenosine
  modified_base (22)..(22): um
  modified_base (23)..(25): 2'O-Methyl Cytosine
  modified_base (26)..(26): 2' Fluoro Guanosine
  modified_base (27)..(29): um
  modified_base (30)..(30): gm
  modified_base (31)..(31): um
  modified_base (32)..(32): 2'O-Methyl Cytosine
  modified_base (33)..(33): gm
  misc_feature (34)..(43): 2'O-Methyl deoxyuridine linker
  modified_base (34)..(43): 2'O-Methyl deoxyuridine
  modified_base (44)..(44): gm
  modified_base (45)..(45): 2'O-Methyl Cytosine
  modified_base (46)..(47): gm
  modified_base (48)..(48): 2'O-Methyl Cytosine
  modified_base (49)..(49): gm
  modified_base (50)..(50): 2'O-Methyl Adenosine
  modified_base (51)..(51): 2'O-Methyl Cytosine
  modified_base (52)..(53): gm
  modified_base (54)..(54): um
  modified_base (55)..(55): 2'O-Methyl Adenosine
  modified_base (56)..(56): gm
  modified_base (57)..(57): 2'O-Methyl Adenosine
  modified_base (58)..(59): um
  modified_base (60)..(60): 2'O-Methyl Adenosine
  modified_base (61)..(61): um
  modified_base (62)..(64): 2' Fluoro Guanosine
  modified_base (65)..(65): 2'O-Methyl Cytosine
  modified_base (66)..(66): 2'O-Methyl Adenosine
  modified_base (67)..(67): 2' Fluoro Guanosine
  modified_base (68)..(68): um
  modified_base (69)..(69): 2' Fluoro Guanosine
  modified_base (70)..(70): um
  modified_base (71)..(71): 2' Fluoro Guanosine
  modified_base (72)..(72): 2'O-Methyl Adenosine
  modified_base (73)..(74): 2'O-Methyl Cytosine
  modified_base (75)..(75): gm
  modified_base (76)..(76): 2'O-Methyl Cytosine
  modified_base (77)..(77): gm
  modified_base (78)..(79): 2'O-Methyl Cytosine
  modified_base (80)..(80): gm
  modified_base (81)..(81): inverted deoxythymidine incorporated at the 3'  end
ccgcgcggagggguuucauaaucccguuugucguuuuuuuuuugcggcgacgguagauuaugggcagugugaccgcgccgc

SEQ ID NO: 84 - RNA, 42 nt, Artificial Sequence
  Aptamer
  modified_base (1)..(1): gm
  modified_base (3)..(4): gm
  modified_base (6)..(6): gm
  modified_base (9)..(10): gm
  modified_base (11)..(11): um
  modified_base (13)..(13): gm
  modified_base (14)..(14): 2'O-Methyl Adenosine
  modified_base (15)..(16): um
  modified_base (18)..(18): um
  modified_base (19)..(21): 2' Fluoro Guanosine
  modified_base (22)..(22): 2'O-Methyl Cytosine
  modified_base (24)..(24): 2' Fluoro Guanosine
  modified_base (25)..(25): um
  modified_base (26)..(26): 2' Fluoro Guanosine
  modified_base (27)..(27): um
  modified_base (28)..(28): 2' Fluoro Guanosine
  modified_base (29)..(29): 2'O-Methyl Adenosine
  modified_base (31)..(31): 2'O-Methyl Cytosine
  modified_base (32)..(32): gm
  modified_base (34)..(34): gm
  modified_base (35)..(36): 2'O-Methyl Cytosine
  modified_base (37)..(37): gm
  modified_base (38)..(39): 2'O-Methyl Cytosine
  modified_base (40)..(40): gm
  modified_base (41)..(41): 2'O-Methyl Adenosine
  misc_feature (42)..(42): The 2'O-Methyl cytosine is attached  through the linker 1,3-propanediolspacer to 2'O-Methyl cytosine of SEQ ID NO: 407
  modified_base (42)..(42): 2'O-Methyl Cytosine
gcggcgacgguagauuaugggcagugugaccgcgccgccgac

SEQ ID NO: 85 - RNA, 38 nt, Artificial Sequence; identical to SEQ ID NO: 78
  Aptamer
  modified_base (1)..(1): gm
  modified_base (2)..(2): 2'O-Methyl Cytosine
  modified_base (3)..(4): gm
  modified_base (5)..(5): 2'O-Methyl Cytosine
  modified_base (6)..(6): gm
  modified_base (7)..(7): 2'O-Methyl Adenosine
  modified_base (8)..(8): 2'O-Methyl Cytosine
  modified_base (9)..(10): gm
  modified_base (11)..(11): um
  modified_base (12)..(12): 2'O-Methyl Adenosine
  modified_base (13)..(13): gm
  modified_base (14)..(14): 2'O-Methyl Adenosine
  modified_base (15)..(16): um
  modified_base (17)..(17): 2'O-Methyl Adenosine
  modified_base (18)..(18): um
  modified_base (19)..(21): 2' Fluoro Guanosine
  modified_base (22)..(22): 2'O-Methyl Cytosine
  modified_base (23)..(23): 2'O-Methyl Adenosine
  modified_base (24)..(24): 2' Fluoro Guanosine
  modified_base (25)..(25): um
  modified_base (26)..(26): 2' Fluoro Guanosine
  modified_base (27)..(27): um
  modified_base (28)..(28): 2' Fluoro Guanosine
  modified_base (29)..(29): 2'O-Methyl Adenosine
  modified_base (30)..(31): 2'O-Methyl Cytosine
  modified_base (32)..(32): gm
  modified_base (33)..(33): 2'O-Methyl Cytosine
  modified_base (34)..(34): gm
  modified_base (35)..(36): 2'O-Methyl Cytosine
  modified_base (37)..(37): gm
  misc_feature (38)..(38): The 2'O-Methyl cytosine is attached  through the linker 1,3-propanediolspacer to 2'O-Methyl cytosine of another nucleotide sequence CXAC
  modified_base (38)..(38): 2'O-Methyl Cytosine

SEQ ID NO: 86 - RNA, 38 nt, Artificial Sequence; identical to SEQ ID NO: 78
  Aptamer
  modified_base (1)..(1): gm
  modified_base (2)..(2): 2'O-Methyl Cytosine
  modified_base (3)..(4): gm
  modified_base (5)..(5): 2'O-Methyl Cytosine
  modified_base (6)..(6): gm
  modified_base (7)..(7): 2'O-Methyl Adenosine
  modified_base (8)..(8): 2'O-Methyl Cytosine
  modified_base (9)..(10): gm
  modified_base (11)..(11): um
  modified_base (12)..(12): 2'O-Methyl Adenosine
  modified_base (13)..(13): gm
  modified_base (14)..(14): 2'O-Methyl Adenosine
  modified_base (15)..(16): um
  modified_base (17)..(17): 2'O-Methyl Adenosine
  modified_base (18)..(18): um
  modified_base (19)..(21): 2' Fluoro Guanosine
  modified_base (22)..(22): 2'O-Methyl Cytosine
  modified_base (23)..(23): 2'O-Methyl Adenosine
  modified_base (24)..(24): 2' Fluoro Guanosine
  modified_base (25)..(25): um
  modified_base (26)..(26): 2' Fluoro Guanosine
  modified_base (27)..(27): um
  modified_base (28)..(28): 2' Fluoro Guanosine
  modified_base (29)..(29): 2'O-Methyl Adenosine
  modified_base (30)..(31): 2'O-Methyl Cytosine
  modified_base (32)..(32): gm
  modified_base (33)..(33): 2'O-Methyl Cytosine
  modified_base (34)..(34): gm
  modified_base (35)..(36): 2'O-Methyl Cytosine
  modified_base (37)..(37): gm
  misc_feature (38)..(38): The 2'O-Methyl cytosine is attached  through the linker Hexaethyleneglycol spacer to 2'O-Methyl cytosine of another nucleotide sequence CXAC
  modified_base (38)..(38): 2'O-Methyl Cytosine

SEQ ID NO: 87 - RNA, 47 nt, Artificial Sequence
  Aptamer
  modified_base (1)..(1): gm
  modified_base (2)..(2): 2'O-Methyl Cytosine
  modified_base (3)..(4): gm
  modified_base (5)..(5): 2'O-Methyl Cytosine
  modified_base (6)..(6): gm
  modified_base (7)..(7): 2'O-Methyl Adenosine
  modified_base (8)..(8): 2'O-Methyl Cytosine
  modified_base (9)..(10): gm
  modified_base (11)..(11): um
  modified_base (12)..(12): 2'O-Methyl Adenosine
  modified_base (13)..(13): gm
  modified_base (14)..(14): 2'O-Methyl Adenosine
  modified_base (15)..(16): um
  modified_base (17)..(17): 2'O-Methyl Adenosine
  modified_base (18)..(18): um
  modified_base (19)..(21): 2' Fluoro Guanosine
  modified_base (22)..(22): 2'O-Methyl Cytosine
  modified_base (23)..(23): 2'O-Methyl Adenosine
  modified_base (24)..(24): 2' Fluoro Guanosine
  modified_base (25)..(25): um
  modified_base (26)..(26): 2' Fluoro Guanosine
  modified_base (27)..(27): um
  modified_base (28)..(28): 2' Fluoro Guanosine
  modified_base (29)..(29): 2'O-Methyl Adenosine
  modified_base (30)..(31): 2'O-Methyl Cytosine
  modified_base (32)..(32): gm
  modified_base (33)..(33): 2'O-Methyl Cytosine
  modified_base (34)..(34): gm
  modified_base (35)..(36): 2'O-Methyl Cytosine
  modified_base (37)..(37): gm
  modified_base (38)..(38): 2'O-Methyl Cytosine
  misc_feature (39)..(43): 2'O-Methyl deoxyuridine linker
  modified_base (39)..(43): 2'O-Methyl deoxyuridine
  modified_base (44)..(44): 2'O-Methyl Cytosine
  modified_base (45)..(45): gm
  modified_base (46)..(46): 2'O-Methyl Adenosine
  misc_feature (47)..(47): The 2'O-Methyl cytosine is attached  through the linker 1,3-propanediolspacer to 2'O-Methyl cytosine of SEQ ID NO: 410
  modified_base (47)..(47): 2'O-Methyl Cytosine
gcggcgacgguagauuaugggcagugugaccgcgccgcuuuuucgac

SEQ ID NO: 88 - RNA, 52 nt, Artificial Sequence
  Aptamer
  modified_base (1)..(1): gm
  modified_base (2)..(2): 2'O-Methyl Cytosine
  modified_base (3)..(4): gm
  modified_base (5)..(5): 2'O-Methyl Cytosine
  modified_base (6)..(6): gm
  modified_base (7)..(7): 2'O-Methyl Adenosine
  modified_base (8)..(8): 2'O-Methyl Cytosine
  modified_base (9)..(10): gm
  modified_base (11)..(11): um
  modified_base (12)..(12): 2'O-Methyl Adenosine
  modified_base (13)..(13): gm
  modified_base (14)..(14): 2'O-Methyl Adenosine
  modified_base (15)..(16): um
  modified_base (17)..(17): 2'O-Methyl Adenosine
  modified_base (18)..(18): um
  modified_base (19)..(21): 2' Fluoro Guanosine
  modified_base (22)..(22): 2'O-Methyl Cytosine
  modified_base (23)..(23): 2'O-Methyl Adenosine
  modified_base (24)..(24): 2' Fluoro Guanosine
  modified_base (25)..(25): um
  modified_base (26)..(26): 2' Fluoro Guanosine
  modified_base (27)..(27): um
  modified_base (28)..(28): 2' Fluoro Guanosine
  modified_base (29)..(29): 2'O-Methyl Adenosine
  modified_base (30)..(31): 2'O-Methyl Cytosine
  modified_base (32)..(32): gm
  modified_base (33)..(33): 2'O-Methyl Cytosine
  modified_base (34)..(34): gm
  modified_base (35)..(36): 2'O-Methyl Cytosine
  modified_base (37)..(37): gm
  modified_base (38)..(38): 2'O-Methyl Cytosine
  misc_feature (39)..(48): 2'O-Methyl deoxyuridine linker
  modified_base (39)..(48): 2'O-Methyl deoxyuridine
  modified_base (49)..(49): 2'O-Methyl Cytosine
  modified_base (50)..(50): gm
  modified_base (51)..(51): 2'O-Methyl Adenosine
  modified_base (52)..(52): 2'O-Methyl Cytosine
gcggcgacgguagauuaugggcagugugaccgcgccgcuuuuuuuuuucgac

SEQ ID NO: 89 - RNA, 73 nt, Artificial Sequence
  Aptamer
  misc_feature (1)..(1): The 2'O-Methyl cytosine is attached  through the linker 1,3-propanediolspacer to 2'O-Methyl cytosine of another nucleotide sequence XCCXAC
  modified_base (1)..(2): 2'O-Methyl Cytosine
  modified_base (3)..(3): 2' Fluoro Guanosine
  modified_base (4)..(4): 2'O-Methyl Cytosine
  modified_base (5)..(5): 2' Fluoro Guanosine
  modified_base (6)..(6): 2'O-Methyl Cytosine
  modified_base (7)..(8): 2' Fluoro Guanosine
  modified_base (9)..(9): 2'O-Methyl Adenosine
  modified_base (10)..(12): 2' Fluoro Guanosine
  modified_base (13)..(13): gm
  modified_base (14)..(16): um
  modified_base (17)..(17): 2'O-Methyl Cytosine
  modified_base (18)..(18): 2'O-Methyl Adenosine
  modified_base (19)..(19): um
  modified_base (20)..(21): 2'O-Methyl Adenosine
  modified_base (22)..(22): um
  modified_base (23)..(25): 2'O-Methyl Cytosine
  modified_base (26)..(26): 2' Fluoro Guanosine
  modified_base (27)..(29): um
  modified_base (30)..(30): gm
  modified_base (31)..(31): um
  modified_base (32)..(32): 2'O-Methyl Cytosine
  modified_base (33)..(34): gm
  modified_base (35)..(35): 2'O-Methyl Cytosine
  modified_base (36)..(36): gm
  modified_base (37)..(37): 2'O-Methyl Cytosine
  modified_base (38)..(39): gm
  modified_base (40)..(40): 2'O-Methyl Cytosine
  modified_base (41)..(41): gm
  modified_base (42)..(42): 2'O-Methyl Adenosine
  modified_base (43)..(43): 2'O-Methyl Cytosine
  modified_base (44)..(45): gm
  modified_base (46)..(46): um
  modified_base (47)..(47): 2'O-Methyl Adenosine
  modified_base (48)..(48): gm
  modified_base (49)..(49): 2'O-Methyl Adenosine
  modified_base (50)..(51): um
  modified_base (52)..(52): 2'O-Methyl Adenosine
  modified_base (53)..(53): um
  modified_base (54)..(56): 2' Fluoro Guanosine
  modified_base (57)..(57): 2'O-Methyl Cytosine
  modified_base (58)..(58): 2'O-Methyl Adenosine
  modified_base (59)..(59): 2' Fluoro Guanosine
  modified_base (60)..(60): um
  modified_base (61)..(61): 2' Fluoro Guanosine
  modified_base (62)..(62): um
  modified_base (63)..(63): 2' Fluoro Guanosine
  modified_base (64)..(64): 2'O-Methyl Adenosine
  modified_base (65)..(66): 2'O-Methyl Cytosine
  modified_base (67)..(67): gm
  modified_base (68)..(68): 2'O-Methyl Cytosine
  modified_base (69)..(69): gm
  modified_base (70)..(71): 2'O-Methyl Cytosine
  modified_base (72)..(72): gm
  modified_base (73)..(73): inverted deoxythymidine incorporated at the 3'  end
  modified_base (73)..(73): 2'O-Methyl Cytosine
ccgcgcggagggguuucauaaucccguuugucggcgcggcgacgguagauuaugggcagugugaccgcgccgc

SEQ ID NO: 90 - RNA, 35 nt, Artificial Sequence; identical to SEQ ID NO: 67
  Aptamer
  misc_feature (1)..(1): The 2'O-Methyl cytosine is attached  through the linker 1,3-propanediolspacer to 2'O-Methyl cytosine of another nucleotide sequence XCCXAC
  modified_base (1)..(2): 2'O-Methyl Cytosine
  modified_base (3)..(3): 2' Fluoro Guanosine
  modified_base (4)..(4): 2'O-Methyl Cytosine
  modified_base (5)..(5): 2' Fluoro Guanosine
  modified_base (6)..(6): 2'O-Methyl Cytosine
  modified_base (7)..(8): 2' Fluoro Guanosine
  modified_base (9)..(9): 2'O-Methyl Adenosine
  modified_base (10)..(12): 2' Fluoro Guanosine
  modified_base (13)..(13): gm
  modified_base (14)..(16): um
  modified_base (17)..(17): 2'O-Methyl Cytosine
  modified_base (18)..(18): 2'O-Methyl Adenosine
  modified_base (19)..(19): um
  modified_base (20)..(21): 2'O-Methyl Adenosine
  modified_base (22)..(22): um
  modified_base (23)..(25): 2'O-Methyl Cytosine
  modified_base (26)..(26): 2' Fluoro Guanosine
  modified_base (27)..(29): um
  modified_base (30)..(30): gm
  modified_base (31)..(31): um
  modified_base (32)..(32): 2'O-Methyl Cytosine
  modified_base (33)..(34): gm
  misc_feature (35)..(35): The 2'O-Methyl cytosine is attached  through the linker 1,3-propanediolspacer to 2'O-Methyl guanosine of SEQ ID NO: 412
  modified_base (35)..(35): 2'O-Methyl Cytosine

SEQ ID NO: 91 - RNA, 35 nt, Artificial Sequence; identical to SEQ ID NO: 67
  Aptamer
  misc_feature (1)..(1): The 2'O-Methyl cytosine is attached  through the linker 1,3-propanediolspacer to 2'O-Methyl cytosine of another nucleotide sequence XCCXAC
  modified_base (1)..(2): 2'O-Methyl Cytosine
  modified_base (3)..(3): 2' Fluoro Guanosine
  modified_base (4)..(4): 2'O-Methyl Cytosine
  modified_base (5)..(5): 2' Fluoro Guanosine
  modified_base (6)..(6): 2'O-Methyl Cytosine
  modified_base (7)..(8): 2' Fluoro Guanosine
  modified_base (9)..(9): 2'O-Methyl Adenosine
  modified_base (10)..(12): 2' Fluoro Guanosine
  modified_base (13)..(13): gm
  modified_base (14)..(16): um
  modified_base (17)..(17): 2'O-Methyl Cytosine
  modified_base (18)..(18): 2'O-Methyl Adenosine
  modified_base (19)..(19): um
  modified_base (20)..(21): 2'O-Methyl Adenosine
  modified_base (22)..(22): um
  modified_base (23)..(25): 2'O-Methyl Cytosine
  modified_base (26)..(26): 2' Fluoro Guanosine
  modified_base (27)..(29): um
  modified_base (30)..(30): gm
  modified_base (31)..(31): um
  modified_base (32)..(32): 2'O-Methyl Cytosine
  modified_base (33)..(34): gm
  misc_feature (35)..(35): The 2'O-Methyl cytosine is attached through the linker Hexaethyleneglycol spacer to 2'O-Methyl guanosine of  SEQ ID NO: 413
  modified_base (35)..(35): 2'O-Methyl Cytosine

SEQ ID NO: 92 - RNA, 78 nt, Artificial Sequence
  Aptamer
  misc_feature (1)..(1): The 2'O-Methyl cytosine is attached  through the linker 1,3-propanediol to 2'O-Methyl cytosine of another nucleotide sequence XCCXAC
  modified_base (1)..(2): 2'O-Methyl Cytosine
  modified_base (3)..(3): 2' Fluoro Guanosine
  modified_base (4)..(4): 2'O-Methyl Cytosine
  modified_base (5)..(5): 2' Fluoro Guanosine
  modified_base (7)..(8): 2' Fluoro Guanosine
  modified_base (9)..(9): 2'O-Methyl Adenosine
  modified_base (10)..(12): 2' Fluoro Guanosine
  modified_base (13)..(13): gm
  modified_base (14)..(16): um
  modified_base (17)..(17): 2'O-Methyl Cytosine
  modified_base (18)..(18): 2'O-Methyl Adenosine
  modified_base (19)..(19): um
  modified_base (20)..(21): 2'O-Methyl Adenosine
  modified_base (22)..(22): um
  modified_base (23)..(25): 2'O-Methyl Cytosine
  modified_base (27)..(29): um
  modified_base (30)..(30): gm
  modified_base (31)..(31): um
  modified_base (32)..(32): 2'O-Methyl Cytosine
  modified_base (33)..(34): gm
  modified_base (35)..(35): 2'O-Methyl Cytosine
  misc_feature (36)..(40): 2'O-Methyl deoxyuridine linker
  modified_base (36)..(40): 2'O-Methyl deoxyuridine
  modified_base (41)..(41): gm
  modified_base (42)..(42): 2'O-Methyl Cytosine
  modified_base (43)..(44): gm
  modified_base (45)..(45): 2'O-Methyl Cytosine
  modified_base (46)..(46): gm
  modified_base (47)..(47): 2'O-Methyl Adenosine
  modified_base (48)..(48): 2'O-Methyl Cytosine
  modified_base (49)..(50): gm
  modified_base (51)..(51): um
  modified_base (52)..(52): 2'O-Methyl Adenosine
  modified_base (53)..(53): gm
  modified_base (54)..(54): 2'O-Methyl Adenosine
  modified_base (55)..(56): um
  modified_base (57)..(57): 2'O-Methyl Adenosine
  modified_base (58)..(58): um
  modified_base (59)..(61): 2' Fluoro Guanosine
  modified_base (59)..(59): gm
  modified_base (60)..(61): gm
  modified_base (62)..(62): 2'O-Methyl Cytosine
  modified_base (63)..(63): 2'O-Methyl Adenosine
  modified_base (64)..(64): 2'O-Methyl Cytosine
  modified_base (64)..(64): 2' Fluoro Guanosine
  modified_base (64)..(64): gm
  modified_base (65)..(65): um
  modified_base (66)..(66): 2' Fluoro Guanosine
  modified_base (66)..(66): gm
  modified_base (67)..(67): um
  modified_base (68)..(68): 2' Fluoro Guanosine
  modified_base (68)..(68): gm
  modified_base (69)..(69): 2'O-Methyl Adenosine
  modified_base (70)..(71): 2'O-Methyl Cytosine
  modified_base (72)..(72): gm
  modified_base (73)..(73): 2'O-Methyl Cytosine
  modified_base (74)..(74): gm
  modified_base (75)..(76): 2'O-Methyl Cytosine
  modified_base (77)..(77): gm
  modified_base (78)..(78): inverted deoxythymidine incorporated at the 3'  end
  modified_base (78)..(78): 2'O-Methyl Cytosine
ccgcgcggagggguuucauaaucccguuugucggcuuuuugcggcgacgguagauuaugggcagugugaccgcgccgc

SEQ ID NO: 93 - RNA, 83 nt, Artificial Sequence
  Aptamer
  misc_feature (1)..(1): The 2'O-Methyl cytosine is attached  through the linker 1,3-propanediolspacer to 2'O-Methyl cytosine of another nucleotide sequence XCCXAC
  modified_base (1)..(2): 2'O-Methyl Cytosine
  modified_base (3)..(3): 2' Fluoro Guanosine
  modified_base (4)..(4): 2'O-Methyl Cytosine
  modified_base (5)..(5): 2' Fluoro Guanosine
  modified_base (6)..(6): 2'O-Methyl Cytosine
  modified_base (7)..(8): 2' Fluoro Guanosine
  modified_base (9)..(9): 2'O-Methyl Adenosine
  modified_base (10)..(12): 2' Fluoro Guanosine
  modified_base (13)..(13): gm
  modified_base (14)..(16): um
  modified_base (17)..(17): 2'O-Methyl Cytosine
  modified_base (18)..(18): 2'O-Methyl Adenosine
  modified_base (19)..(19): um
  modified_base (20)..(21): 2'O-Methyl Adenosine
  modified_base (22)..(22): um
  modified_base (23)..(25): 2'O-Methyl Cytosine
  modified_base (26)..(26): 2' Fluoro Guanosine
  modified_base (27)..(29): um
  modified_base (30)..(30): gm
  modified_base (31)..(31): um
  modified_base (32)..(32): 2'O-Methyl Cytosine
  modified_base (33)..(34): gm
  modified_base (35)..(35): 2'O-Methyl Cytosine
  misc_feature (36)..(45): 2'O-Methyl deoxyuridine linker
  modified_base (36)..(45): 2'O-Methyl deoxyuridine
  modified_base (46)..(46): gm
  modified_base (47)..(47): 2'O-Methyl Cytosine
  modified_base (48)..(49): gm
  modified_base (50)..(50): 2'O-Methyl Cytosine
  modified_base (51)..(51): gm
  modified_base (52)..(52): 2'O-Methyl Adenosine
  modified_base (53)..(53): 2'O-Methyl Cytosine
  modified_base (54)..(55): gm
  modified_base (56)..(56): um
  modified_base (57)..(57): 2'O-Methyl Adenosine
  modified_base (58)..(58): gm
  modified_base (59)..(59): 2'O-Methyl Adenosine
  modified_base (60)..(61): um
  modified_base (62)..(62): 2'O-Methyl Adenosine
  modified_base (63)..(63): um
  modified_base (64)..(66): gm
  modified_base (67)..(67): 2'O-Methyl Cytosine
  modified_base (68)..(68): 2'O-Methyl Adenosine
  modified_base (69)..(69): gm
  modified_base (70)..(70): um
  modified_base (71)..(71): gm
  modified_base (72)..(72): um
  modified_base (73)..(73): gm
  modified_base (74)..(74): 2'O-Methyl Adenosine
  modified_base (75)..(76): 2'O-Methyl Cytosine
  modified_base (77)..(77): gm
  modified_base (78)..(78): 2'O-Methyl Cytosine
  modified_base (79)..(79): gm
  modified_base (80)..(81): 2'O-Methyl Cytosine
  modified_base (82)..(82): gm
  modified_base (83)..(83): inverted deoxythymidine incorporated at the 3'  end
  modified_base (83)..(83): 2'O-Methyl Cytosine
ccgcgcggagggguuucauaaucccguuugucggcuuuuuuuuuugcggcgacgguagauuaugggcagugugaccgcgccgc

SEQ ID NO: 94 - RNA, 44 nt, Artificial Sequence
  Aptamer
  modified_base (1)..(1): gm
  modified_base (2)..(2): 2'O-Methyl Cytosine
  modified_base (3)..(4): gm
  modified_base (5)..(5): 2'O-Methyl Cytosine
  modified_base (6)..(6): gm
  modified_base (7)..(7): 2'O-Methyl Adenosine
  modified_base (8)..(8): 2'O-Methyl Cytosine
  modified_base (9)..(9): gm
  modified_base (10)..(10): gm
  modified_base (11)..(11): um
  modified_base (12)..(12): 2'O-Methyl Adenosine
  modified_base (13)..(13): gm
  modified_base (14)..(14): 2'O-Methyl Adenosine
  modified_base (15)..(16): um
  modified_base (17)..(17): 2'O-Methyl Adenosine
  modified_base (18)..(18): um
  modified_base (19)..(21): 2' Fluoro Guanosine
  modified_base (22)..(22): 2'O-Methyl Cytosine
  modified_base (23)..(23): 2'O-Methyl Adenosine
  modified_base (24)..(24): 2' Fluoro Guanosine
  modified_base (25)..(25): um
  modified_base (26)..(26): 2' Fluoro Guanosine
  modified_base (27)..(27): um
  modified_base (28)..(28): 2' Fluoro Guanosine
  modified_base (29)..(29): 2'O-Methyl Adenosine
  modified_base (30)..(31): 2'O-Methyl Cytosine
  modified_base (32)..(32): gm
  modified_base (33)..(33): 2'O-Methyl Cytosine
  modified_base (34)..(34): gm
  modified_base (35)..(36): 2'O-Methyl Cytosine
  modified_base (37)..(37): gm
  modified_base (38)..(38): 2'O-Methyl Cytosine
  modified_base (39)..(39): gm
  modified_base (40)..(41): 2'O-Methyl Cytosine
  modified_base (42)..(42): gm
  modified_base (43)..(43): 2'O-Methyl Adenosine
  misc_feature (44)..(44): The 2'O-Methyl cytosine is attached  through the linker 1,3-propanediolspacer to 2'O-Methyl cytosine of SEQ ID NO: 414
  modified_base (44)..(44): 2'O-Methyl Cytosine
gcggcgacgguagauuaugggcagugugaccgcgccgcgccgac

SEQ ID NO: 95 - RNA, 38 nt, Artificial Sequence; identical to SEQ ID NO: 78
  Aptamer
  modified_base (1)..(1): gm
  modified_base (2)..(2): 2'O-Methyl Cytosine
  modified_base (3)..(4): gm
  modified_base (5)..(5): 2'O-Methyl Cytosine
  modified_base (6)..(6): gm
  modified_base (7)..(7): 2'O-Methyl Adenosine
  modified_base (8)..(8): 2'O-Methyl Cytosine
  modified_base (9)..(10): gm
  modified_base (11)..(11): um
  modified_base (12)..(12): 2'O-Methyl Adenosine
  modified_base (13)..(13): gm
  modified_base (14)..(14): 2'O-Methyl Adenosine
  modified_base (15)..(16): um
  modified_base (17)..(17): 2'O-Methyl Adenosine
  modified_base (18)..(18): um
  modified_base (19)..(21): 2' Fluoro Guanosine
  modified_base (22)..(22): 2'O-Methyl Cytosine
  modified_base (23)..(23): 2'O-Methyl Adenosine
  modified_base (24)..(24): 2' Fluoro Guanosine
  modified_base (25)..(25): um
  modified_base (26)..(26): 2' Fluoro Guanosine
  modified_base (27)..(27): um
  modified_base (28)..(28): 2' Fluoro Guanosine
  modified_base (29)..(29): 2'O-Methyl Adenosine
  modified_base (30)..(31): 2'O-Methyl Cytosine
  modified_base (32)..(32): gm
  modified_base (33)..(33): 2'O-Methyl Cytosine
  modified_base (34)..(34): gm
  modified_base (35)..(36): 2'O-Methyl Cytosine
  modified_base (37)..(37): gm
  misc_feature (38)..(38): The 2'O-Methyl cytosine is attached  through the linker 1,3-propanediolspacer to 2'O-Methyl guanosine of another nucleotide sequence XCCXAC
  modified_base (38)..(38): 2'O-Methyl Cytosine

SEQ ID NO: 96 - RNA, 38 nt, Artificial Sequence; identical to SEQ ID NO: 78
  Aptamer
  modified_base (1)..(1): gm
  modified_base (2)..(2): 2'O-Methyl Cytosine
  modified_base (3)..(4): gm
  modified_base (5)..(5): 2'O-Methyl Cytosine
  modified_base (6)..(6): gm
  modified_base (7)..(7): 2'O-Methyl Adenosine
  modified_base (8)..(8): 2'O-Methyl Cytosine
  modified_base (9)..(9): gm
  modified_base (10)..(10): gm
  modified_base (11)..(11): um
  modified_base (12)..(12): 2'O-Methyl Adenosine
  modified_base (13)..(13): gm
  modified_base (14)..(14): 2'O-Methyl Adenosine
  modified_base (15)..(16): um
  modified_base (17)..(17): 2'O-Methyl Adenosine
  modified_base (18)..(18): um
  modified_base (19)..(21): 2' Fluoro Guanosine
  modified_base (22)..(22): 2'O-Methyl Cytosine
  modified_base (23)..(23): 2'O-Methyl Adenosine
  modified_base (24)..(24): 2' Fluoro Guanosine
  modified_base (25)..(25): um
  modified_base (26)..(26): 2' Fluoro Guanosine
  modified_base (27)..(27): um
  modified_base (28)..(28): 2' Fluoro Guanosine
  modified_base (29)..(29): 2'O-Methyl Adenosine
  modified_base (30)..(31): 2'O-Methyl Cytosine
  modified_base (32)..(32): gm
  modified_base (33)..(33): 2'O-Methyl Cytosine
  modified_base (34)..(34): gm
  modified_base (35)..(36): 2'O-Methyl Cytosine
  modified_base (37)..(37): gm
  misc_feature (38)..(38): The 2'O-Methyl cytosine is attached  through the linker Hexaethyleneglycol spacer to 2'O-Methyl guanosine of another nucleotide sequence XCCXAC
  modified_base (38)..(38): 2'O-Methyl Cytosine

SEQ ID NO: 97 - RNA, 49 nt, Artificial Sequence
  Aptamer
  modified_base (1)..(1): gm
  modified_base (2)..(2): 2'O-Methyl Cytosine
  modified_base (3)..(4): gm
  modified_base (5)..(5): 2'O-Methyl Cytosine
  modified_base (6)..(6): gm
  modified_base (7)..(7): 2'O-Methyl Adenosine
  modified_base (8)..(8): 2'O-Methyl Cytosine
  modified_base (9)..(10): gm
  modified_base (11)..(11): um
  modified_base (12)..(12): 2'O-Methyl Adenosine
  modified_base (13)..(13): gm
  modified_base (14)..(14): 2'O-Methyl Adenosine
  modified_base (15)..(16): um
  modified_base (17)..(17): 2'O-Methyl Adenosine
  modified_base (18)..(18): um
  modified_base (19)..(21): 2' Fluoro Guanosine
  modified_base (22)..(22): 2'O-Methyl Cytosine
  modified_base (23)..(23): 2'O-Methyl Adenosine
  modified_base (24)..(24): 2' Fluoro Guanosine
  modified_base (25)..(25): um
  modified_base (26)..(26): 2' Fluoro Guanosine
  modified_base (27)..(27): um
  modified_base (28)..(28): 2' Fluoro Guanosine
  modified_base (29)..(29): 2'O-Methyl Adenosine
  modified_base (30)..(31): 2'O-Methyl Cytosine
  modified_base (32)..(32): gm
  modified_base (33)..(33): 2'O-Methyl Cytosine
  modified_base (34)..(34): gm
  modified_base (35)..(36): 2'O-Methyl Cytosine
  modified_base (37)..(37): gm
  modified_base (38)..(38): 2'O-Methyl Cytosine
  misc_feature (39)..(43): 2'O-Methyl deoxyuridine linker
  modified_base (39)..(43): 2'O-Methyl deoxyuridine
  modified_base (44)..(44): gm
  modified_base (45)..(46): 2'O-Methyl Cytosine
  modified_base (47)..(47): gm
  modified_base (48)..(48): 2'O-Methyl Adenosine
  misc_feature (49)..(49): The 2'O-Methyl cytosine is attached  through the linker 1,3-propanediolspacer to 2'O-Methyl cytosine of SEQ ID NO: 417
  modified_base (49)..(49): 2'O-Methyl Cytosine
gcggcgacgguagauuaugggcagugugaccgcgccgcuuuuugccgac

SEQ ID NO: 98 - RNA, 54 nt, Artificial Sequence
  Aptamer
  modified_base (1)..(1): gm
  modified_base (2)..(2): 2'O-Methyl Cytosine
  modified_base (3)..(4): gm
  modified_base (5)..(5): 2'O-Methyl Cytosine
  modified_base (6)..(6): gm
  modified_base (7)..(7): 2'O-Methyl Adenosine
  modified_base (8)..(8): 2'O-Methyl Cytosine
  modified_base (9)..(10): gm
  modified_base (11)..(11): um
  modified_base (12)..(12): 2'O-Methyl Adenosine
  modified_base (13)..(13): gm
  modified_base (14)..(14): 2'O-Methyl Adenosine
  modified_base (15)..(16): um
  modified_base (17)..(17): 2'O-Methyl Adenosine
  modified_base (18)..(18): um
  modified_base (19)..(21): 2' Fluoro Guanosine
  modified_base (22)..(22): 2'O-Methyl Cytosine
  modified_base (23)..(23): 2'O-Methyl Adenosine
  modified_base (24)..(24): 2' Fluoro Guanosine
  modified_base (25)..(25): um
  modified_base (26)..(26): 2' Fluoro Guanosine
  modified_base (27)..(27): um
  modified_base (28)..(28): 2' Fluoro Guanosine
  modified_base (29)..(29): 2'O-Methyl Adenosine
  modified_base (30)..(31): 2'O-Methyl Cytosine
  modified_base (32)..(32): gm
  modified_base (33)..(33): 2'O-Methyl Cytosine
  modified_base (34)..(34): gm
  modified_base (35)..(36): 2'O-Methyl Cytosine
  modified_base (37)..(37): gm
  modified_base (38)..(38): 2'O-Methyl Cytosine
  misc_feature (39)..(48): 2'O-Methyl deoxyuridine linker
  modified_base (39)..(48): 2'O-Methyl deoxyuridine
  modified_base (49)..(49): gm
  modified_base (50)..(51): 2'O-Methyl Cytosine
  modified_base (52)..(52): gm
  modified_base (53)..(53): 2'O-Methyl Adenosine
  misc_feature (54)..(54): The 2'O-Methyl cytosine is attached  through the linker 1,3-propanediolspacer to 2'O-Methyl cytosine of SEQ ID NO: 418
  modified_base (54)..(54): 2'O-Methyl Cytosine
gcggcgacgguagauuaugggcagugugaccgcgccgcuuuuuuuuuugccgac

SEQ ID NO: 99 - RNA, 36 nt, Artificial Sequence; identical to SEQ ID NO: 9
  Aptamer
  modified_base (1)..(1): 2'O-Methyl Cytosine
  modified_base (2)..(2): gm
  modified_base (3)..(3): 2'O-Methyl Adenosine
  modified_base (4)..(4): 2'O-Methyl Cytosine
  modified_base (5)..(5): um
  modified_base (6)..(6): 2'O-Methyl Cytosine
  modified_base (7)..(7): 2'O-Methyl Cytosine
  modified_base (8)..(8): 2' Fluoro Guanosine
  modified_base (9)..(9): 2'O-Methyl Cytosine
  modified_base (10)..(10): 2' Fluoro Guanosine
  modified_base (11)..(11): 2'O-Methyl Cytosine
  modified_base (12)..(13): 2' Fluoro Guanosine
  modified_base (14)..(14): 2'O-Methyl Adenosine
  modified_base (15)..(16): 2' Fluoro Guanosine
  modified_base (17)..(17): 2'O-Methyl Cytosine
  modified_base (18)..(19): um
  modified_base (20)..(20): 2' Fluoro Guanosine
  modified_base (21)..(21): 2'O-Methyl Adenosine
  modified_base (22)..(23): 2' Fluoro Guanosine
  modified_base (24)..(24): um
  modified_base (25)..(25): 2'O-Methyl Adenosine
  modified_base (26)..(26): 2' Fluoro Guanosine
  modified_base (27)..(28): 2'O-Methyl Cytosine
  modified_base (29)..(29): 2' Fluoro Guanosine
  modified_base (30)..(32): um
  modified_base (33)..(33): gm
  modified_base (34)..(34): um
  modified_base (35)..(35): 2'O-Methyl Cytosine
  misc_feature (36)..(36): inverted deoxythymidine incorporated at the 3'  end
  modified_base (36)..(36): gm

SEQ ID NO: 100 - RNA, 70 nt, Artificial Sequence
  Aptamer
  modified_base (1)..(1): 2'O-Methyl Cytosine
  modified_base (2)..(2): gm
  modified_base (3)..(3): 2'O-Methyl Adenosine
  modified_base (4)..(4): 2'O-Methyl Cytosine
  modified_base (5)..(5): um
  modified_base (6)..(7): 2'O-Methyl Cytosine
  modified_base (8)..(8): 2' Fluoro Guanosine
  modified_base (9)..(9): 2'O-Methyl Cytosine
  modified_base (10)..(10): 2' Fluoro Guanosine
  modified_base (11)..(11): 2'O-Methyl Cytosine
  modified_base (12)..(13): 2' Fluoro Guanosine
  modified_base (14)..(14): 2'O-Methyl Adenosine
  modified_base (15)..(16): 2' Fluoro Guanosine
  modified_base (17)..(17): 2'O-Methyl Cytosine
  modified_base (18)..(19): um
  modified_base (20)..(20): 2' Fluoro Guanosine
  modified_base (21)..(21): 2'O-Methyl Adenosine
  modified_base (22)..(23): 2' Fluoro Guanosine
  modified_base (24)..(24): um
  modified_base (25)..(25): 2'O-Methyl Adenosine
  modified_base (26)..(26): 2' Fluoro Guanosine
  modified_base (27)..(28): 2'O-Methyl Cytosine
  modified_base (29)..(29): 2' Fluoro Guanosine
  modified_base (30)..(32): um
  modified_base (33)..(33): gm
  modified_base (34)..(34): um
  modified_base (35)..(35): 2'O-Methyl Cytosine
  modified_base (36)..(38): gm
  modified_base (39)..(39): 2'O-Methyl Cytosine
  modified_base (40)..(40): gm
  modified_base (41)..(41): 2'O-Methyl Adenosine
  modified_base (42)..(42): 2'O-Methyl Cytosine
  modified_base (43)..(44): gm
  modified_base (45)..(45): um
  modified_base (46)..(46): 2'O-Methyl Adenosine
  modified_base (47)..(47): gm
  modified_base (48)..(48): 2'O-Methyl Adenosine
  modified_base (49)..(50): um
  modified_base (51)..(51): 2'O-Methyl Adenosine
  modified_base (52)..(52): um
  modified_base (53)..(55): 2' Fluoro Guanosine
  modified_base (56)..(56): 2'O-Methyl Cytosine
  modified_base (57)..(57): 2'O-Methyl Adenosine
  modified_base (58)..(58): 2' Fluoro Guanosine
  modified_base (59)..(59): um
  modified_base (60)..(60): 2' Fluoro Guanosine
  modified_base (61)..(61): um
  modified_base (62)..(62): 2' Fluoro Guanosine
  modified_base (63)..(63): 2'O-Methyl Adenosine
  modified_base (64)..(64): 2'O-Methyl Cytosine
  modified_base (64)..(65): 2'O-Methyl Cytosine
  modified_base (66)..(66): gm
  modified_base (67)..(67): 2'O-Methyl Cytosine
  modified_base (68)..(68): gm
  modified_base (69)..(70): 2'O-Methyl Cytosine
  modified_base (70)..(70): inverted deoxythymidine incorporated at the 3'  end
cgacuccgcgcggaggcuugagguagccguuugucgggcgacgguagauuaugggcagugugaccgcgcc

SEQ ID NO: 101 - RNA, 36 nt, Artificial Sequence; identical to SEQ ID NO: 9
  Aptamer
  modified_base (1)..(1): 2'O-Methyl Cytosine
  modified_base (2)..(2): gm
  modified_base (3)..(3): 2'O-Methyl Adenosine
  modified_base (4)..(4): 2'O-Methyl Cytosine
  modified_base (5)..(5): um
  modified_base (6)..(7): 2'O-Methyl Cytosine
  modified_base (8)..(8): 2' Fluoro Guanosine
  modified_base (9)..(9): 2'O-Methyl Cytosine
  modified_base (10)..(10): 2' Fluoro Guanosine
  modified_base (11)..(11): 2'O-Methyl Cytosine
  modified_base (12)..(13): 2' Fluoro Guanosine
  modified_base (14)..(14): 2'O-Methyl Adenosine
  modified_base (15)..(16): 2' Fluoro Guanosine
  modified_base (17)..(17): 2'O-Methyl Cytosine
  modified_base (18)..(19): um
  modified_base (20)..(20): 2' Fluoro Guanosine
  modified_base (21)..(21): 2'O-Methyl Adenosine
  modified_base (22)..(23): 2' Fluoro Guanosine
  modified_base (24)..(24): um
  modified_base (25)..(25): 2'O-Methyl Adenosine
  modified_base (26)..(26): 2' Fluoro Guanosine
  modified_base (27)..(28): 2'O-Methyl Cytosine
  modified_base (29)..(29): 2' Fluoro Guanosine
  modified_base (30)..(32): um
  modified_base (33)..(33): gm
  modified_base (34)..(34): um
  modified_base (35)..(35): 2'O-Methyl Cytosine
  misc_feature (36)..(36): The 2'O-Methyl guanosine is attached  through the linker 1,3-propanediolspacer to 2'O-Methyl guanosine of SEQ ID NO: 419
  modified_base (36)..(36): gm

SEQ ID NO: 102 - RNA, 36 nt, Artificial Sequence; identical to SEQ ID NO: 9
  Aptamer
  modified_base (1)..(1): 2'O-Methyl Cytosine
  modified_base (2)..(2): gm
  modified_base (3)..(3): 2'O-Methyl Adenosine
  modified_base (4)..(4): 2'O-Methyl Cytosine
  modified_base (5)..(5): um
  modified_base (6)..(7): 2'O-Methyl Cytosine
  modified_base (8)..(8): 2' Fluoro Guanosine
  modified_base (9)..(9): 2'O-Methyl Cytosine
  modified_base (10)..(10): 2' Fluoro Guanosine
  modified_base (11)..(11): 2'O-Methyl Cytosine
  modified_base (12)..(13): 2' Fluoro Guanosine
  modified_base (14)..(14): 2'O-Methyl Adenosine
  modified_base (15)..(16): 2' Fluoro Guanosine
  modified_base (17)..(17): 2'O-Methyl Cytosine
  modified_base (18)..(19): um
  modified_base (20)..(20): 2' Fluoro Guanosine
  modified_base (21)..(21): 2'O-Methyl Adenosine
  modified_base (22)..(23): 2' Fluoro Guanosine
  modified_base (24)..(24): um
  modified_base (25)..(25): 2'O-Methyl Adenosine
  modified_base (26)..(26): 2' Fluoro Guanosine
  modified_base (27)..(28): 2'O-Methyl Cytosine
  modified_base (29)..(29): 2' Fluoro Guanosine
  modified_base (29)..(29): 2' Fluoro Guanosine
  modified_base (30)..(32): um
  modified_base (33)..(33): gm
  modified_base (34)..(34): um
  modified_base (35)..(35): 2'O-Methyl Cytosine
  misc_feature (36)..(36): The 2'O-Methyl guanosine is attached through the linker Hexaethyleneglycol spacer to 2'O-Methyl guanosine of  SEQ ID NO: 420
  modified_base (36)..(36): gm

SEQ ID NO: 103 - RNA, 75 nt, Artificial Sequence
  Aptamer
  modified_base (1)..(1): 2'O-Methyl Cytosine
  modified_base (2)..(2): gm
  modified_base (3)..(3): 2'O-Methyl Adenosine
  modified_base (4)..(4): 2'O-Methyl Cytosine
  modified_base (5)..(5): um
  modified_base (6)..(7): 2'O-Methyl Cytosine
  modified_base (8)..(8): 2' Fluoro Guanosine
  modified_base (9)..(9): 2'O-Methyl Cytosine
  modified_base (10)..(10): 2' Fluoro Guanosine
  modified_base (11)..(11): 2'O-Methyl Cytosine
  modified_base (12)..(13): 2' Fluoro Guanosine
  modified_base (14)..(14): 2'O-Methyl Adenosine
  modified_base (15)..(16): 2' Fluoro Guanosine
  modified_base (17)..(17): 2'O-Methyl Cytosine
  modified_base (18)..(19): um
  modified_base (20)..(20): 2' Fluoro Guanosine
  modified_base (21)..(21): 2'O-Methyl Adenosine
  modified_base (22)..(23): 2' Fluoro Guanosine
  modified_base (24)..(24): um
  modified_base (25)..(25): 2'O-Methyl Adenosine
  modified_base (26)..(26): 2' Fluoro Guanosine
  modified_base (27)..(28): 2'O-Methyl Cytosine
  modified_base (29)..(29): 2' Fluoro Guanosine
  modified_base (30)..(32): um
  modified_base (33)..(33): gm
  modified_base (34)..(34): um
  modified_base (35)..(35): 2'O-Methyl Cytosine
  modified_base (36)..(36): gm
  misc_feature (37)..(41): 2'O-Methyl deoxyuridine linker
  modified_base (37)..(41): 2'O-Methyl deoxyuridine
  modified_base (42)..(43): gm
  modified_base (44)..(44): 2'O-Methyl Cytosine
  modified_base (45)..(45): gm
  modified_base (46)..(46): 2'O-Methyl Adenosine
  modified_base (47)..(47): 2'O-Methyl Cytosine
  modified_base (48)..(49): gm
  modified_base (50)..(50): um
  modified_base (51)..(51): 2'O-Methyl Adenosine
  modified_base (52)..(52): gm
  modified_base (53)..(53): 2'O-Methyl Adenosine
  modified_base (54)..(55): um
  modified_base (56)..(56): 2'O-Methyl Adenosine
  modified_base (57)..(57): um
  modified_base (58)..(60): 2' Fluoro Guanosine
  modified_base (61)..(61): 2'O-Methyl Cytosine
  modified_base (62)..(62): 2'O-Methyl Adenosine
  modified_base (63)..(63): 2' Fluoro Guanosine
  modified_base (64)..(64): um
  modified_base (65)..(65): 2' Fluoro Guanosine
  modified_base (66)..(66): um
  modified_base (67)..(67): 2' Fluoro Guanosine
  modified_base (68)..(68): 2'O-Methyl Adenosine
  modified_base (69)..(70): 2'O-Methyl Cytosine
  modified_base (71)..(71): gm
  modified_base (72)..(72): 2'O-Methyl Cytosine
  modified_base (73)..(73): gm
  modified_base (74)..(75): 2'O-Methyl Cytosine
  modified_base (75)..(75): inverted deoxythymidine incorporated at the 3'  end
cgacuccgcgcggaggcuugagguagccguuugucguuuuuggcgacgguagauuaugggcagugugaccgcgcc

SEQ ID NO: 104 - RNA, 80 nt, Artificial Sequence
  Aptamer
  modified_base (1)..(1): 2'O-Methyl Cytosine
  modified_base (2)..(2): gm
  modified_base (3)..(3): 2'O-Methyl Adenosine
  modified_base (4)..(4): 2'O-Methyl Cytosine
  modified_base (5)..(5): um
  modified_base (6)..(7): 2'O-Methyl Cytosine
  modified_base (8)..(8): 2' Fluoro Guanosine
  modified_base (9)..(9): 2'O-Methyl Cytosine
  modified_base (10)..(10): 2' Fluoro Guanosine
  modified_base (11)..(11): 2'O-Methyl Cytosine
  modified_base (12)..(13): 2' Fluoro Guanosine
  modified_base (14)..(14): 2'O-Methyl Adenosine
  modified_base (15)..(16): 2' Fluoro Guanosine
  modified_base (17)..(17): 2'O-Methyl Cytosine
  modified_base (18)..(19): um
  modified_base (20)..(20): 2' Fluoro Guanosine
  modified_base (21)..(21): 2'O-Methyl Adenosine
  modified_base (22)..(23): 2' Fluoro Guanosine
  modified_base (24)..(24): um
  modified_base (25)..(25): 2'O-Methyl Adenosine
  modified_base (26)..(26): 2' Fluoro Guanosine
  modified_base (27)..(28): 2'O-Methyl Cytosine
  modified_base (29)..(29): 2' Fluoro Guanosine
  modified_base (30)..(32): um
  modified_base (33)..(33): gm
  modified_base (34)..(34): um
  modified_base (35)..(35): 2'O-Methyl Cytosine
  modified_base (36)..(36): gm
  misc_feature (37)..(46): 2'O-Methyl deoxyuridine linker
  modified_base (37)..(46): 2'O-Methyl deoxyuridine
  modified_base (47)..(48): gm
  modified_base (49)..(49): 2'O-Methyl Cytosine
  modified_base (50)..(50): gm
  modified_base (51)..(51): 2'O-Methyl Adenosine
  modified_base (52)..(52): 2'O-Methyl Cytosine
  modified_base (53)..(54): gm
  modified_base (55)..(55): um
  modified_base (56)..(56): 2'O-Methyl Adenosine
  modified_base (57)..(57): gm
  modified_base (58)..(58): 2'O-Methyl Adenosine
  modified_base (59)..(60): um
  modified_base (61)..(61): 2'O-Methyl Adenosine
  modified_base (62)..(62): um
  modified_base (63)..(65): 2' Fluoro Guanosine
  modified_base (66)..(66): 2'O-Methyl Cytosine
  modified_base (67)..(67): 2'O-Methyl Adenosine
  modified_base (68)..(68): 2' Fluoro Guanosine
  modified_base (69)..(69): um
  modified_base (70)..(70): 2' Fluoro Guanosine
  modified_base (71)..(71): um
  modified_base (72)..(72): 2' Fluoro Guanosine
  modified_base (73)..(73): 2'O-Methyl Adenosine
  modified_base (74)..(75): 2'O-Methyl Cytosine
  modified_base (76)..(76): gm
  modified_base (77)..(77): 2'O-Methyl Cytosine
  modified_base (78)..(78): gm
  modified_base (79)..(80): 2'O-Methyl Cytosine
  modified_base (80)..(80): inverted deoxythymidine incorporated at the 3'  end
cgacuccgcgcggaggcuugagguagccguuugucguuuuuuuuuuggcgacgguagauuaugggcagugugaccgcgcc

SEQ ID NO: 105 - RNA, 70 nt, Artificial Sequence
  Aptamer
  modified_base (1)..(2): gm
  modified_base (3)..(3): 2'O-Methyl Cytosine
  modified_base (4)..(4): gm
  modified_base (5)..(5): 2'O-Methyl Adenosine
  modified_base (6)..(6): 2'O-Methyl Cytosine
  modified_base (7)..(8): gm
  modified_base (9)..(9): um
  modified_base (10)..(10): 2'O-Methyl Adenosine
  modified_base (11)..(11): gm
  modified_base (12)..(12): 2'O-Methyl Adenosine
  modified_base (13)..(14): um
  modified_base (15)..(15): 2'O-Methyl Adenosine
  modified_base (16)..(16): um
  modified_base (17)..(19): 2' Fluoro Guanosine
  modified_base (20)..(20): 2'O-Methyl Cytosine
  modified_base (21)..(21): 2'O-Methyl Adenosine
  modified_base (22)..(22): 2' Fluoro Guanosine
  modified_base (23)..(23): um
  modified_base (24)..(24): 2' Fluoro Guanosine
  modified_base (25)..(25): um
  modified_base (26)..(26): 2' Fluoro Guanosine
  modified_base (27)..(27): 2'O-Methyl Adenosine
  modified_base (28)..(29): 2'O-Methyl Cytosine
  modified_base (30)..(30): gm
  modified_base (31)..(31): 2'O-Methyl Cytosine
  modified_base (32)..(32): gm
  modified_base (33)..(35): 2'O-Methyl Cytosine
  modified_base (36)..(36): gm
  modified_base (37)..(37): 2'O-Methyl Adenosine
  modified_base (38)..(38): 2'O-Methyl Cytosine
  modified_base (39)..(39): um
  modified_base (40)..(41): 2'O-Methyl Cytosine
  modified_base (42)..(42): 2' Fluoro Guanosine
  modified_base (43)..(43): 2'O-Methyl Cytosine
  modified_base (44)..(44): 2' Fluoro Guanosine
  modified_base (45)..(45): 2'O-Methyl Cytosine
  modified_base (46)..(47): 2' Fluoro Guanosine
  modified_base (48)..(48): 2'O-Methyl Adenosine
  modified_base (49)..(50): 2' Fluoro Guanosine
  modified_base (51)..(51): 2'O-Methyl Cytosine
  modified_base (52)..(53): um
  modified_base (54)..(54): 2' Fluoro Guanosine
  modified_base (55)..(55): 2'O-Methyl Adenosine
  modified_base (56)..(57): 2' Fluoro Guanosine
  modified_base (58)..(58): um
  modified_base (59)..(59): 2'O-Methyl Adenosine
  modified_base (60)..(60): 2' Fluoro Guanosine
  modified_base (61)..(62): 2'O-Methyl Cytosine
  modified_base (63)..(63): gm
  modified_base (64)..(66): um
  modified_base (67)..(67): gm
  modified_base (68)..(68): um
  modified_base (69)..(69): 2'O-Methyl Cytosine
  modified_base (70)..(70): inverted deoxythymidine incorporated at the 3'  end
  modified_base (70)..(70): gm
ggcgacgguagauuaugggcagugugaccgcgcccgacuccgcgcggaggcuugagguagccguuugucg

SEQ ID NO: 106 - RNA, 34 nt, Artificial Sequence; identical to SEQ ID NO: 48
  Aptamer
  modified_base (1)..(2): gm
  modified_base (3)..(3): 2'O-Methyl Cytosine
  modified_base (4)..(4): gm
  modified_base (5)..(5): 2'O-Methyl Adenosine
  modified_base (6)..(6): 2'O-Methyl Cytosine
  modified_base (7)..(8): gm
  modified_base (9)..(9): um
  modified_base (10)..(10): 2'O-Methyl Adenosine
  modified_base (11)..(11): gm
  modified_base (12)..(12): 2'O-Methyl Adenosine
  modified_base (13)..(14): um
  modified_base (15)..(15): 2'O-Methyl Adenosine
  modified_base (16)..(16): um
  modified_base (17)..(19): 2' Fluoro Guanosine
  modified_base (20)..(20): 2'O-Methyl Cytosine
  modified_base (21)..(21): 2'O-Methyl Adenosine
  modified_base (22)..(22): 2' Fluoro Guanosine
  modified_base (23)..(23): um
  modified_base (24)..(24): 2' Fluoro Guanosine
  modified_base (25)..(25): um
  modified_base (26)..(26): 2' Fluoro Guanosine
  modified_base (27)..(27): 2'O-Methyl Adenosine
  modified_base (28)..(29): 2'O-Methyl Cytosine
  modified_base (30)..(30): gm
  modified_base (31)..(31): 2'O-Methyl Cytosine
  modified_base (32)..(32): gm
  modified_base (33)..(34): 2'O-Methyl Cytosine
  misc_feature (34)..(34): The 2'O-Methyl cytosine is attached  through the linker 1,3-propanediolspacer to 2'O-Methyl cytosine of SEQ ID NO: 421
  misc_feature (34)..(34): The 2'O-Methyl cytosine is attached through the linker Hexaethyleneglycol spacer to 2'O-Methyl cytosine of SEQ ID NO: 422

SEQ ID NO: 107 - RNA, 75 nt, Artificial Sequence
  Aptamer
  modified_base (1)..(2): gm
  modified_base (3)..(3): 2'O-Methyl Cytosine
  modified_base (4)..(4): gm
  modified_base (5)..(5): 2'O-Methyl Adenosine
  modified_base (6)..(6): 2'O-Methyl Cytosine
  modified_base (7)..(8): gm
  modified_base (9)..(9): um
  modified_base (10)..(10): 2'O-Methyl Adenosine
  modified_base (11)..(11): gm
  modified_base (12)..(12): 2'O-Methyl Adenosine
  modified_base (13)..(14): um
  modified_base (15)..(15): 2'O-Methyl Adenosine
  modified_base (16)..(16): um
  modified_base (17)..(19): 2' Fluoro Guanosine
  modified_base (20)..(20): 2'O-Methyl Cytosine
  modified_base (21)..(21): 2'O-Methyl Adenosine
  modified_base (22)..(22): 2' Fluoro Guanosine
  modified_base (23)..(23): um
  modified_base (24)..(24): 2' Fluoro Guanosine
  modified_base (25)..(25): um
  modified_base (26)..(26): 2' Fluoro Guanosine
  modified_base (27)..(27): 2'O-Methyl Adenosine
  modified_base (28)..(29): 2'O-Methyl Cytosine
  modified_base (30)..(30): gm
  modified_base (31)..(31): 2'O-Methyl Cytosine
  modified_base (32)..(32): gm
  modified_base (33)..(34): 2'O-Methyl Cytosine
  misc_feature (35)..(39): 2'O-Methyl deoxyuridine linker
  modified_base (35)..(39): 2'O-Methyl deoxyuridine
  modified_base (40)..(40): 2'O-Methyl Cytosine
  modified_base (41)..(41): gm
  modified_base (42)..(42): 2'O-Methyl Adenosine
  modified_base (43)..(43): 2'O-Methyl Cytosine
  modified_base (44)..(44): um
  modified_base (45)..(46): 2'O-Methyl Cytosine
  modified_base (47)..(47): 2' Fluoro Guanosine
  modified_base (48)..(48): 2'O-Methyl Cytosine
  modified_base (49)..(49): 2' Fluoro Guanosine
  modified_base (50)..(50): 2'O-Methyl Cytosine
  modified_base (51)..(52): 2' Fluoro Guanosine
  modified_base (53)..(53): 2'O-Methyl Adenosine
  modified_base (54)..(55): 2' Fluoro Guanosine
  modified_base (56)..(56): 2'O-Methyl Cytosine
  modified_base (57)..(58): um
  modified_base (59)..(59): 2' Fluoro Guanosine
  modified_base (60)..(60): 2'O-Methyl Adenosine
  modified_base (61)..(62): 2' Fluoro Guanosine
  modified_base (63)..(63): um
  modified_base (64)..(64): 2'O-Methyl Adenosine
  modified_base (65)..(65): 2' Fluoro Guanosine
  modified_base (66)..(67): 2'O-Methyl Cytosine
  modified_base (68)..(68): 2' Fluoro Guanosine
  modified_base (69)..(71): um
  modified_base (72)..(72): gm
  modified_base (73)..(73): um
  modified_base (74)..(74): 2'O-Methyl Cytosine
  misc_feature (75)..(75): inverted deoxythymidine incorporated at the 3'  end
  modified_base (75)..(75): gm
ggcgacgguagauuaugggcagugugaccgcgccuuuuucgacuccgcgcggaggcuugagguagccguuugucg

SEQ ID NO: 108 - RNA, 80 nt, Artificial Sequence
  Aptamer
  modified_base (1)..(2): gm
  modified_base (3)..(3): 2'O-Methyl Cytosine
  modified_base (4)..(4): gm
  modified_base (5)..(5): 2'O-Methyl Adenosine
  modified_base (6)..(6): 2'O-Methyl Cytosine
  modified_base (7)..(8): gm
  modified_base (9)..(9): um
  modified_base (10)..(10): 2'O-Methyl Adenosine
  modified_base (11)..(11): gm
  modified_base (12)..(12): 2'O-Methyl Adenosine
  modified_base (13)..(14): um
  modified_base (15)..(15): 2'O-Methyl Adenosine
  modified_base (16)..(16): um
  modified_base (17)..(19): 2' Fluoro Guanosine
  modified_base (20)..(20): 2'O-Methyl Cytosine
  modified_base (21)..(21): 2'O-Methyl Adenosine
  modified_base (22)..(22): 2' Fluoro Guanosine
  modified_base (23)..(23): um
  modified_base (24)..(24): 2' Fluoro Guanosine
  modified_base (25)..(25): um
  modified_base (26)..(26): 2' Fluoro Guanosine
  modified_base (27)..(27): 2'O-Methyl Adenosine
  modified_base (28)..(29): 2'O-Methyl Cytosine
  modified_base (30)..(30): gm
  modified_base (31)..(31): 2'O-Methyl Cytosine
  modified_base (32)..(32): gm
  modified_base (33)..(34): 2'O-Methyl Cytosine
  misc_feature (35)..(44): 2'O-Methyl deoxyuridine linker
  modified_base (35)..(44): 2'O-Methyl deoxyuridine
  modified_base (45)..(45): 2'O-Methyl Cytosine
  modified_base (46)..(46): gm
  modified_base (47)..(47): 2'O-Methyl Adenosine
  modified_base (48)..(48): 2'O-Methyl Cytosine
  modified_base (49)..(49): um
  modified_base (50)..(51): 2'O-Methyl Cytosine
  modified_base (52)..(52): 2' Fluoro Guanosine
  modified_base (53)..(53): 2'O-Methyl Cytosine
  modified_base (54)..(54): 2' Fluoro Guanosine
  modified_base (55)..(55): 2'O-Methyl Cytosine
  modified_base (56)..(57): 2' Fluoro Guanosine
  modified_base (58)..(58): 2'O-Methyl Adenosine
  modified_base (59)..(60): 2' Fluoro Guanosine
  modified_base (61)..(61): 2'O-Methyl Cytosine
  modified_base (62)..(63): um
  modified_base (64)..(64): 2' Fluoro Guanosine
  modified_base (65)..(65): 2'O-Methyl Adenosine
  modified_base (66)..(67): 2' Fluoro Guanosine
  modified_base (68)..(68): um
  modified_base (69)..(69): 2'O-Methyl Adenosine
  modified_base (70)..(70): 2' Fluoro Guanosine
  modified_base (71)..(72): 2'O-Methyl Cytosine
  modified_base (73)..(73): 2' Fluoro Guanosine
  modified_base (74)..(76): um
  modified_base (77)..(77): gm
  modified_base (78)..(78): um
  modified_base (79)..(79): 2'O-Methyl Cytosine
  modified_base (80)..(80): inverted deoxythymidine incorporated at the 3'  end
  modified_base (80)..(80): gm
ggcgacgguagauuaugggcagugugaccgcgccuuuuuuuuuucgacuccgcgcggaggcuugagguagccguuugucg

SEQ ID NO: 109 - RNA, 70 nt, Artificial Sequence; identical to SEQ ID NO: 105
  Aptamer
  modified_base (1)..(2): gm
  modified_base (3)..(3): 2'O-Methyl Cytosine
  modified_base (4)..(4): gm
  modified_base (5)..(5): 2'O-Methyl Adenosine
  modified_base (6)..(6): 2'O-Methyl Cytosine
  modified_base (7)..(8): gm
  modified_base (9)..(9): um
  modified_base (10)..(10): 2'O-Methyl Adenosine
  modified_base (11)..(11): gm
  modified_base (12)..(12): 2'O-Methyl Adenosine
  modified_base (13)..(14): um
  modified_base (15)..(15): 2'O-Methyl Adenosine
  modified_base (16)..(16): um
  modified_base (17)..(19): 2' Fluoro Guanosine
  modified_base (20)..(20): 2'O-Methyl Cytosine
  modified_base (21)..(21): 2'O-Methyl Adenosine
  modified_base (22)..(22): 2' Fluoro Guanosine
  modified_base (23)..(23): um
  modified_base (24)..(24): 2' Fluoro Guanosine
  modified_base (25)..(25): um
  modified_base (26)..(26): 2' Fluoro Guanosine
  modified_base (27)..(27): 2'O-Methyl Adenosine
  modified_base (28)..(29): 2'O-Methyl Cytosine
  modified_base (30)..(30): gm
  modified_base (31)..(31): 2'O-Methyl Cytosine
  modified_base (32)..(32): gm
  modified_base (33)..(35): 2'O-Methyl Cytosine
  modified_base (36)..(36): gm
  modified_base (37)..(37): 2'O-Methyl Adenosine
  modified_base (38)..(38): 2'O-Methyl Cytosine
  modified_base (39)..(39): um
  modified_base (40)..(41): 2'O-Methyl Cytosine
  modified_base (42)..(42): 2' Fluoro Guanosine
  modified_base (43)..(43): 2'O-Methyl Cytosine
  modified_base (44)..(44): 2' Fluoro Guanosine
  modified_base (45)..(45): 2'O-Methyl Cytosine
  modified_base (46)..(47): 2' Fluoro Guanosine
  modified_base (48)..(48): 2'O-Methyl Adenosine
  modified_base (49)..(50): 2' Fluoro Guanosine
  modified_base (51)..(51): 2'O-Methyl Cytosine
  modified_base (52)..(53): um
  modified_base (54)..(54): 2' Fluoro Guanosine
  modified_base (55)..(55): 2'O-Methyl Adenosine
  modified_base (56)..(57): 2' Fluoro Guanosine
  modified_base (58)..(58): um
  modified_base (59)..(59): 2'O-Methyl Adenosine
  modified_base (60)..(60): 2' Fluoro Guanosine
  modified_base (61)..(62): 2'O-Methyl Cytosine
  modified_base (63)..(63): gm
  modified_base (64)..(66): um
  modified_base (67)..(67): gm
  modified_base (68)..(68): um
  modified_base (69)..(69): 2'O-Methyl Cytosine
  modified_base (70)..(70): inverted deoxythymidine incorporated at the 3'  end
  modified_base (70)..(70): gm

SEQ ID NO: 110 - RNA, 40 nt, Artificial Sequence
  Aptamer
  modified_base (1)..(1): gm
  modified_base (2)..(3): 2'O-Methyl Cytosine
  modified_base (4)..(4): gm
  modified_base (5)..(5): 2'O-Methyl Adenosine
  modified_base (6)..(6): 2'O-Methyl Cytosine
  modified_base (7)..(7): um
  modified_base (8)..(9): 2'O-Methyl Cytosine
  modified_base (10)..(10): 2' Fluoro Guanosine
  modified_base (11)..(11): 2'O-Methyl Cytosine
  modified_base (12)..(12): 2' Fluoro Guanosine
  modified_base (13)..(13): 2'O-Methyl Cytosine
  modified_base (14)..(15): 2' Fluoro Guanosine
  modified_base (16)..(16): 2'O-Methyl Adenosine
  modified_base (17)..(18): 2' Fluoro Guanosine
  modified_base (19)..(19): 2'O-Methyl Cytosine
  modified_base (20)..(21): um
  modified_base (22)..(22): 2' Fluoro Guanosine
  modified_base (23)..(23): 2'O-Methyl Adenosine
  modified_base (24)..(25): 2' Fluoro Guanosine
  modified_base (26)..(26): um
  modified_base (27)..(27): 2'O-Methyl Adenosine
  modified_base (28)..(28): 2' Fluoro Guanosine
  modified_base (29)..(30): 2'O-Methyl Cytosine
  modified_base (31)..(31): 2' Fluoro Guanosine
  modified_base (32)..(34): um
  modified_base (35)..(35): gm
  modified_base (36)..(36): um
  modified_base (37)..(37): 2'O-Methyl Cytosine
  modified_base (38)..(39): gm
  modified_base (40)..(40): inverted deoxythymidine incorporated at the 3'  end
  modified_base (40)..(40): 2'O-Methyl Cytosine
gccgacuccgcgcggaggcuugagguagccguuugucggc

SEQ ID NO: 111 - RNA, 74 nt, Artificial Sequence
  Aptamer
  modified_base (1)..(1): gm
  modified_base (2)..(3): 2'O-Methyl Cytosine
  modified_base (4)..(4): gm
  modified_base (5)..(5): 2'O-Methyl Adenosine
  modified_base (6)..(6): 2'O-Methyl Cytosine
  modified_base (7)..(7): um
  modified_base (8)..(9): 2'O-Methyl Cytosine
  modified_base (10)..(10): 2' Fluoro Guanosine
  modified_base (11)..(11): 2'O-Methyl Cytosine
  modified_base (12)..(12): 2' Fluoro Guanosine
  modified_base (13)..(13): 2'O-Methyl Cytosine
  modified_base (14)..(15): 2' Fluoro Guanosine
  modified_base (16)..(16): 2'O-Methyl Adenosine
  modified_base (17)..(18): 2' Fluoro Guanosine
  modified_base (19)..(19): 2'O-Methyl Cytosine
  modified_base (20)..(21): um
  modified_base (22)..(22): 2' Fluoro Guanosine
  modified_base (23)..(23): 2'O-Methyl Adenosine
  modified_base (24)..(25): 2' Fluoro Guanosine
  modified_base (26)..(26): um
  modified_base (27)..(27): 2'O-Methyl Adenosine
  modified_base (28)..(28): 2' Fluoro Guanosine
  modified_base (29)..(30): 2'O-Methyl Cytosine
  modified_base (31)..(31): 2' Fluoro Guanosine
  modified_base (32)..(34): um
  modified_base (35)..(35): gm
  modified_base (36)..(36): um
  modified_base (37)..(37): 2'O-Methyl Cytosine
  modified_base (38)..(39): gm
  modified_base (40)..(40): 2'O-Methyl Cytosine
  modified_base (41)..(42): gm
  modified_base (43)..(43): 2'O-Methyl Cytosine
  modified_base (44)..(44): gm
  modified_base (45)..(45): 2'O-Methyl Adenosine
  modified_base (46)..(46): 2'O-Methyl Cytosine
  modified_base (47)..(48): gm
  modified_base (49)..(49): um
  modified_base (50)..(50): 2'O-Methyl Adenosine
  modified_base (51)..(51): gm
  modified_base (52)..(52): 2'O-Methyl Adenosine
  modified_base (53)..(54): um
  modified_base (55)..(55): 2'O-Methyl Adenosine
  modified_base (56)..(56): um
  modified_base (57)..(59): 2' Fluoro Guanosine
  modified_base (60)..(60): 2'O-Methyl Cytosine
  modified_base (61)..(61): 2'O-Methyl Adenosine
  modified_base (62)..(62): 2' Fluoro Guanosine
  modified_base (63)..(63): um
  modified_base (64)..(64): 2' Fluoro Guanosine
  modified_base (65)..(65): um
  modified_base (66)..(66): 2' Fluoro Guanosine
  modified_base (67)..(67): 2'O-Methyl Adenosine
  modified_base (68)..(69): 2'O-Methyl Cytosine
  modified_base (70)..(70): gm
  modified_base (71)..(71): 2'O-Methyl Cytosine
  modified_base (72)..(72): gm
  modified_base (73)..(74): 2'O-Methyl Cytosine
  modified_base (74)..(74): inverted deoxythymidine incorporated at the 3'  end
gccgacuccgcgcggaggcuugagguagccguuugucggcggcgacgguagauuaugggcagugugaccgcgcc

SEQ ID NO: 112 - RNA, 40 nt, Artificial Sequence; identical to SEQ ID NO: 110
  Aptamer
  modified_base (1)..(1): gm
  modified_base (2)..(3): 2'O-Methyl Cytosine
  modified_base (4)..(4): gm
  modified_base (5)..(5): 2'O-Methyl Adenosine
  modified_base (6)..(6): 2'O-Methyl Cytosine
  modified_base (7)..(7): um
  modified_base (8)..(9): 2'O-Methyl Cytosine
  modified_base (10)..(10): 2' Fluoro Guanosine
  modified_base (11)..(11): 2'O-Methyl Cytosine
  modified_base (12)..(12): 2' Fluoro Guanosine
  modified_base (13)..(13): 2'O-Methyl Cytosine
  modified_base (14)..(15): 2' Fluoro Guanosine
  modified_base (16)..(16): 2'O-Methyl Adenosine
  modified_base (17)..(18): 2' Fluoro Guanosine
  modified_base (19)..(19): 2'O-Methyl Cytosine
  modified_base (20)..(21): um
  modified_base (22)..(22): 2' Fluoro Guanosine
  modified_base (23)..(23): 2'O-Methyl Adenosine
  modified_base (24)..(25): 2' Fluoro Guanosine
  modified_base (26)..(26): um
  modified_base (27)..(27): 2'O-Methyl Adenosine
  modified_base (28)..(28): 2' Fluoro Guanosine
  modified_base (29)..(30): 2'O-Methyl Cytosine
  modified_base (31)..(31): 2' Fluoro Guanosine
  modified_base (32)..(34): um
  modified_base (35)..(35): gm
  modified_base (36)..(36): um
  modified_base (37)..(37): 2'O-Methyl Cytosine
  modified_base (38)..(39): gm
  misc_feature (40)..(40): The 2'O-Methyl cytosine is attached  through the linker 1,3-propanediolspacer to 2'O-Methyl guanosine of SEQ ID NO: 423
  modified_base (40)..(40): 2'O-Methyl Cytosine

SEQ ID NO: 113 - RNA, 40 nt, Artificial Sequence; identical to SEQ ID NO: 110
  Aptamer
  modified_base (2)..(3): 2'O-Methyl Cytosine
  modified_base (5)..(5): 2'O-Methyl Adenosine
  modified_base (6)..(6): 2'O-Methyl Cytosine
  modified_base (7)..(7): um
  modified_base (8)..(9): 2'O-Methyl Cytosine
  modified_base (10)..(10): 2' Fluoro Guanosine
  modified_base (11)..(11): 2'O-Methyl Cytosine
  modified_base (12)..(12): 2' Fluoro Guanosine
  modified_base (13)..(13): 2'O-Methyl Cytosine
  modified_base (14)..(15): 2' Fluoro Guanosine
  modified_base (16)..(16): 2'O-Methyl Adenosine
  modified_base (17)..(18): 2' Fluoro Guanosine
  modified_base (19)..(19): 2'O-Methyl Cytosine
  modified_base (20)..(21): um
  modified_base (22)..(22): 2' Fluoro Guanosine
  modified_base (23)..(23): 2'O-Methyl Adenosine
  modified_base (24)..(25): 2' Fluoro Guanosine
  modified_base (26)..(26): um
  modified_base (27)..(27): 2'O-Methyl Adenosine
  modified_base (28)..(28): 2' Fluoro Guanosine
  modified_base (29)..(30): 2'O-Methyl Cytosine
  modified_base (31)..(31): 2' Fluoro Guanosine
  modified_base (32)..(34): um
  modified_base (35)..(35): 2' Fluoro Guanosine
  modified_base (36)..(36): um
  modified_base (37)..(37): 2'O-Methyl Cytosine
  modified_base (38)..(39): 2' Fluoro Guanosine
  misc_feature (40)..(40): The 2'O-Methyl cytosine is attached through the linker hexaethylene glycol spacer to 2'O-Methyl guanosine of SEQ ID NO:424
  modified_base (40)..(40): 2'O-Methyl Cytosine

SEQ ID NO: 114 - RNA, 79 nt, Artificial Sequence
  Aptamer
  modified_base (1)..(1): gm
  modified_base (2)..(3): 2'O-Methyl Cytosine
  modified_base (4)..(4): gm
  modified_base (5)..(5): 2'O-Methyl Adenosine
  modified_base (6)..(6): 2'O-Methyl Cytosine
  modified_base (7)..(7): um
  modified_base (8)..(9): 2'O-Methyl Cytosine
  modified_base (10)..(10): 2' Fluoro Guanosine
  modified_base (11)..(11): 2'O-Methyl Cytosine
  modified_base (12)..(12): 2' Fluoro Guanosine
  modified_base (13)..(13): 2'O-Methyl Cytosine
  modified_base (14)..(15): 2' Fluoro Guanosine
  modified_base (16)..(16): 2'O-Methyl Adenosine
  modified_base (17)..(18): 2' Fluoro Guanosine
  modified_base (19)..(19): 2'O-Methyl Cytosine
  modified_base (20)..(21): um
  modified_base (22)..(22): 2' Fluoro Guanosine
  modified_base (23)..(23): 2'O-Methyl Adenosine
  modified_base (24)..(25): 2' Fluoro Guanosine
  modified_base (26)..(26): um
  modified_base (27)..(27): 2'O-Methyl Adenosine
  modified_base (28)..(28): 2' Fluoro Guanosine
  modified_base (29)..(30): 2'O-Methyl Cytosine
  modified_base (31)..(31): 2' Fluoro Guanosine
  modified_base (32)..(34): um
  modified_base (35)..(35): gm
  modified_base (36)..(36): um
  modified_base (37)..(37): 2'O-Methyl Cytosine
  modified_base (38)..(39): gm
  modified_base (40)..(40): 2'O-Methyl Cytosine
  misc_feature (41)..(45): 2'O-Methyl deoxyuridine linker
  modified_base (41)..(45): 2'O-Methyl deoxyuridine
  modified_base (46)..(47): gm
  modified_base (48)..(48): 2'O-Methyl Cytosine
  modified_base (49)..(49): gm
  modified_base (50)..(50): 2'O-Methyl Adenosine
  modified_base (51)..(51): 2'O-Methyl Cytosine
  modified_base (52)..(53): gm
  modified_base (54)..(54): um
  modified_base (55)..(55): 2'O-Methyl Adenosine
  modified_base (56)..(56): gm
  modified_base (57)..(57): 2'O-Methyl Adenosine
  modified_base (58)..(59): um
  modified_base (60)..(60): 2'O-Methyl Adenosine
  modified_base (61)..(61): um
  modified_base (62)..(64): 2' Fluoro Guanosine
  modified_base (65)..(65): 2'O-Methyl Cytosine
  modified_base (66)..(66): 2'O-Methyl Adenosine
  modified_base (67)..(67): 2' Fluoro Guanosine
  modified_base (68)..(68): um
  modified_base (69)..(69): 2' Fluoro Guanosine
  modified_base (70)..(70): um
  modified_base (71)..(71): 2' Fluoro Guanosine
  modified_base (72)..(72): 2'O-Methyl Adenosine
  modified_base (73)..(74): 2'O-Methyl Cytosine
  modified_base (75)..(75): gm
  modified_base (76)..(76): 2'O-Methyl Cytosine
  modified_base (77)..(77): gm
  modified_base (78)..(79): 2'O-Methyl Cytosine
  misc_feature (79)..(79): inverted deoxythymidine incorporated at the 3'  end
gccgacuccgcgcggaggcuugagguagccguuugucggcuuuuuggcgacgguagauuaugggcagugugaccgcgcc

SEQ ID NO: 115 - RNA, 84 nt, Artificial Sequence
  Aptamer
  modified_base (1)..(1): gm
  modified_base (2)..(3): 2'O-Methyl Cytosine
  modified_base (4)..(4): gm
  modified_base (5)..(5): 2'O-Methyl Adenosine
  modified_base (6)..(6): 2'O-Methyl Cytosine
  modified_base (7)..(7): um
  modified_base (8)..(9): 2'O-Methyl Cytosine
  modified_base (10)..(10): 2' Fluoro Guanosine
  modified_base (11)..(11): 2'O-Methyl Cytosine
  modified_base (12)..(12): 2' Fluoro Guanosine
  modified_base (13)..(13): 2'O-Methyl Cytosine
  modified_base (14)..(15): 2' Fluoro Guanosine
  modified_base (16)..(16): 2'O-Methyl Adenosine
  modified_base (17)..(18): 2' Fluoro Guanosine
  modified_base (19)..(19): 2'O-Methyl Cytosine
  modified_base (20)..(21): um
  modified_base (22)..(22): 2' Fluoro Guanosine
  modified_base (23)..(23): 2'O-Methyl Adenosine
  modified_base (24)..(25): 2' Fluoro Guanosine
  modified_base (26)..(26): um
  modified_base (27)..(27): 2'O-Methyl Adenosine
  modified_base (28)..(28): 2' Fluoro Guanosine
  modified_base (29)..(30): 2'O-Methyl Cytosine
  modified_base (31)..(31): 2' Fluoro Guanosine
  modified_base (32)..(34): um
  modified_base (35)..(35): gm
  modified_base (36)..(36): um
  modified_base (37)..(37): 2'O-Methyl Cytosine
  modified_base (38)..(39): gm
  modified_base (40)..(40): 2'O-Methyl Cytosine
  misc_feature (41)..(50): 2'O-Methyl deoxyuridine linker
  modified_base (41)..(50): 2'O-Methyl deoxyuridine
  modified_base (51)..(52): gm
  modified_base (53)..(53): 2'O-Methyl Cytosine
  modified_base (54)..(54): gm
  modified_base (55)..(55): 2'O-Methyl Adenosine
  modified_base (56)..(56): 2'O-Methyl Cytosine
  modified_base (57)..(58): gm
  modified_base (59)..(59): um
  modified_base (60)..(60): 2'O-Methyl Adenosine
  modified_base (61)..(61): gm
  modified_base (62)..(62): 2'O-Methyl Adenosine
  modified_base (63)..(64): um
  modified_base (65)..(65): 2'O-Methyl Adenosine
  modified_base (66)..(66): um
  modified_base (67)..(69): 2' Fluoro Guanosine
  modified_base (70)..(70): 2'O-Methyl Cytosine
  modified_base (71)..(71): 2'O-Methyl Adenosine
  modified_base (72)..(72): 2' Fluoro Guanosine
  modified_base (73)..(73): um
  modified_base (74)..(74): 2' Fluoro Guanosine
  modified_base (75)..(75): um
  modified_base (76)..(76): 2' Fluoro Guanosine
  modified_base (77)..(77): 2'O-Methyl Adenosine
  modified_base (78)..(79): 2'O-Methyl Cytosine
  modified_base (80)..(80): gm
  modified_base (81)..(81): 2'O-Methyl Cytosine
  modified_base (82)..(82): gm
  modified_base (83)..(84): 2'O-Methyl Cytosine
  modified_base (84)..(84): inverted deoxythymidine incorporated at the 3'  end
gccgacuccgcgcggaggcuugagguagccguuugucggcuuuuuuuuuuggcgacgguagauuaugggcagugugaccgcgcc

SEQ ID NO: 116 - RNA, 74 nt, Artificial Sequence
  Aptamer
  modified_base (1)..(2): gm
  modified_base (3)..(3): 2'O-Methyl Cytosine
  modified_base (4)..(4): gm
  modified_base (5)..(5): 2'O-Methyl Adenosine
  modified_base (6)..(6): 2'O-Methyl Cytosine
  modified_base (7)..(8): gm
  modified_base (9)..(9): um
  modified_base (10)..(10): 2'O-Methyl Adenosine
  modified_base (11)..(11): gm
  modified_base (12)..(12): 2'O-Methyl Adenosine
  modified_base (13)..(14): um
  modified_base (15)..(15): 2'O-Methyl Adenosine
  modified_base (16)..(16): um
  modified_base (17)..(19): 2' Fluoro Guanosine
  modified_base (20)..(20): 2'O-Methyl Cytosine
  modified_base (21)..(21): 2'O-Methyl Adenosine
  modified_base (22)..(22): 2' Fluoro Guanosine
  modified_base (23)..(23): um
  modified_base (24)..(24): 2' Fluoro Guanosine
  modified_base (25)..(25): um
  modified_base (26)..(26): 2' Fluoro Guanosine
  modified_base (27)..(27): 2'O-Methyl Adenosine
  modified_base (28)..(29): 2'O-Methyl Cytosine
  modified_base (30)..(30): gm
  modified_base (31)..(31): 2'O-Methyl Cytosine
  modified_base (32)..(32): gm
  modified_base (33)..(34): 2'O-Methyl Cytosine
  modified_base (35)..(35): gm
  modified_base (36)..(37): 2'O-Methyl Cytosine
  modified_base (38)..(38): gm
  modified_base (39)..(39): 2'O-Methyl Adenosine
  modified_base (40)..(40): 2'O-Methyl Cytosine
  modified_base (41)..(41): um
  modified_base (42)..(43): 2'O-Methyl Cytosine
  modified_base (44)..(44): 2' Fluoro Guanosine
  modified_base (45)..(45): 2'O-Methyl Cytosine
  modified_base (46)..(46): 2' Fluoro Guanosine
  modified_base (47)..(47): 2'O-Methyl Cytosine
  modified_base (48)..(49): 2' Fluoro Guanosine
  modified_base (50)..(50): 2'O-Methyl Adenosine
  modified_base (51)..(52): 2' Fluoro Guanosine
  modified_base (53)..(53): 2'O-Methyl Cytosine
  modified_base (54)..(55): um
  modified_base (56)..(56): 2' Fluoro Guanosine
  modified_base (57)..(57): 2'O-Methyl Adenosine
  modified_base (58)..(59): 2' Fluoro Guanosine
  modified_base (60)..(60): um
  modified_base (61)..(61): 2'O-Methyl Adenosine
  modified_base (62)..(62): 2' Fluoro Guanosine
  modified_base (63)..(64): 2'O-Methyl Cytosine
  modified_base (65)..(65): 2' Fluoro Guanosine
  modified_base (66)..(68): um
  modified_base (69)..(69): gm
  modified_base (70)..(70): um
  modified_base (71)..(71): 2'O-Methyl Cytosine
  modified_base (72)..(73): gm
  modified_base (74)..(74): inverted deoxythymidine incorporated at the 3'  end
  modified_base (74)..(74): 2'O-Methyl Cytosine
ggcgacgguagauuaugggcagugugaccgcgccgccgacuccgcgcggaggcuugagguagccguuugucggc

SEQ ID NO: 117 - RNA, 34 nt, Artificial Sequence; identical to SEQ ID NO: 48
  Aptamer
  modified_base (1)..(2): gm
  modified_base (3)..(3): 2'O-Methyl Cytosine
  modified_base (4)..(4): gm
  modified_base (5)..(5): 2'O-Methyl Adenosine
  modified_base (6)..(6): 2'O-Methyl Cytosine
  modified_base (7)..(8): gm
  modified_base (9)..(9): um
  modified_base (10)..(10): 2'O-Methyl Adenosine
  modified_base (11)..(11): gm
  modified_base (12)..(12): 2'O-Methyl Adenosine
  modified_base (13)..(14): um
  modified_base (15)..(15): 2'O-Methyl Adenosine
  modified_base (16)..(16): um
  modified_base (17)..(19): 2' Fluoro Guanosine
  modified_base (20)..(20): 2'O-Methyl Cytosine
  modified_base (21)..(21): 2'O-Methyl Adenosine
  modified_base (22)..(22): 2' Fluoro Guanosine
  modified_base (23)..(23): um
  modified_base (24)..(24): 2' Fluoro Guanosine
  modified_base (25)..(25): um
  modified_base (26)..(26): 2' Fluoro Guanosine
  modified_base (27)..(27): 2'O-Methyl Adenosine
  modified_base (28)..(29): 2'O-Methyl Cytosine
  modified_base (30)..(30): gm
  modified_base (31)..(31): 2'O-Methyl Cytosine
  modified_base (32)..(32): gm
  modified_base (33)..(34): 2'O-Methyl Cytosine
  misc_feature (34)..(34): The 2'O-Methyl cytosine is attached  through the linker 1,3-propanediolspacer to 2'O-Methyl guanosine of SEQ ID NO: 425

SEQ ID NO: 118 - RNA, 34 nt, Artificial Sequence; identical to SEQ ID NO: 48
  Aptamer
  modified_base (1)..(2): gm
  modified_base (3)..(3): 2'O-Methyl Cytosine
  modified_base (4)..(4): gm
  modified_base (5)..(5): 2'O-Methyl Adenosine
  modified_base (6)..(6): 2'O-Methyl Cytosine
  modified_base (7)..(8): gm
  modified_base (9)..(9): um
  modified_base (10)..(10): 2'O-Methyl Adenosine
  modified_base (11)..(11): gm
  modified_base (12)..(12): 2'O-Methyl Adenosine
  modified_base (13)..(14): um
  modified_base (15)..(15): 2'O-Methyl Adenosine
  modified_base (16)..(16): um
  modified_base (17)..(19): 2' Fluoro Guanosine
  modified_base (20)..(20): 2'O-Methyl Cytosine
  modified_base (21)..(21): 2'O-Methyl Adenosine
  modified_base (22)..(22): 2' Fluoro Guanosine
  modified_base (23)..(23): um
  modified_base (24)..(24): 2' Fluoro Guanosine
  modified_base (25)..(25): um
  modified_base (26)..(26): 2' Fluoro Guanosine
  modified_base (27)..(27): 2'O-Methyl Adenosine
  modified_base (28)..(29): 2'O-Methyl Cytosine
  modified_base (30)..(30): gm
  modified_base (31)..(31): 2'O-Methyl Cytosine
  modified_base (32)..(32): gm
  modified_base (33)..(34): 2'O-Methyl Cytosine
  misc_feature (34)..(34): The 2'O-Methyl cytosine is attached through the linker hexaethylene glycol spacer to 2'O-Methyl guanosine of SEQ ID NO:426

SEQ ID NO: 119 - RNA, 79 nt, Artificial Sequence
  Aptamer
  modified_base (1)..(2): gm
  modified_base (3)..(3): 2'O-Methyl Cytosine
  modified_base (4)..(4): gm
  modified_base (5)..(5): 2'O-Methyl Adenosine
  modified_base (6)..(6): 2'O-Methyl Cytosine
  modified_base (7)..(8): gm
  modified_base (9)..(9): um
  modified_base (10)..(10): 2'O-Methyl Adenosine
  modified_base (11)..(11): gm
  modified_base (12)..(12): 2'O-Methyl Adenosine
  modified_base (13)..(14): um
  modified_base (15)..(15): 2'O-Methyl Adenosine
  modified_base (16)..(16): um
  modified_base (17)..(19): 2' Fluoro Guanosine
  modified_base (20)..(20): 2'O-Methyl Cytosine
  modified_base (21)..(21): 2'O-Methyl Adenosine
  modified_base (22)..(22): 2' Fluoro Guanosine
  modified_base (23)..(23): um
  modified_base (24)..(24): 2' Fluoro Guanosine
  modified_base (25)..(25): um
  modified_base (26)..(26): 2' Fluoro Guanosine
  modified_base (27)..(27): 2'O-Methyl Adenosine
  modified_base (28)..(29): 2'O-Methyl Cytosine
  modified_base (30)..(30): gm
  modified_base (31)..(31): 2'O-Methyl Cytosine
  modified_base (32)..(32): gm
  modified_base (33)..(34): 2'O-Methyl Cytosine
  misc_feature (35)..(39): 2'O-Methyl deoxyuridine linker
  modified_base (35)..(39): 2'O-Methyl deoxyuridine
  modified_base (40)..(40): gm
  modified_base (41)..(42): 2'O-Methyl Cytosine
  modified_base (43)..(43): gm
  modified_base (44)..(44): 2'O-Methyl Adenosine
  modified_base (45)..(45): 2'O-Methyl Cytosine
  modified_base (46)..(46): um
  modified_base (47)..(48): 2'O-Methyl Cytosine
  modified_base (49)..(49): 2' Fluoro Guanosine
  modified_base (50)..(50): 2'O-Methyl Cytosine
  modified_base (51)..(51): 2' Fluoro Guanosine
  modified_base (52)..(52): 2'O-Methyl Cytosine
  modified_base (53)..(54): 2' Fluoro Guanosine
  modified_base (55)..(55): 2'O-Methyl Adenosine
  modified_base (56)..(57): 2' Fluoro Guanosine
  modified_base (58)..(58): 2'O-Methyl Cytosine
  modified_base (59)..(60): um
  modified_base (61)..(61): 2' Fluoro Guanosine
  modified_base (62)..(62): 2'O-Methyl Adenosine
  modified_base (63)..(64): 2' Fluoro Guanosine
  modified_base (65)..(65): um
  modified_base (66)..(66): 2'O-Methyl Adenosine
  modified_base (67)..(67): 2' Fluoro Guanosine
  modified_base (68)..(68): 2'O-Methyl Cytosine
  modified_base (69)..(69): 2'O-Methyl Cytosine
  modified_base (70)..(70): 2' Fluoro Guanosine
  modified_base (71)..(73): um
  modified_base (74)..(74): gm
  modified_base (75)..(75): um
  modified_base (76)..(76): 2'O-Methyl Cytosine
  modified_base (77)..(78): gm
  modified_base (79)..(79): inverted deoxythymidine incorporated at the 3'  end
  modified_base (79)..(79): 2'O-Methyl Cytosine
ggcgacgguagauuaugggcagugugaccgcgccuuuuugccgacuccgcgcggaggcuugagguagccguuugucggc

SEQ ID NO: 120 - RNA, 84 nt, Artificial Sequence
  Aptamer
  modified_base (1)..(2): gm
  modified_base (3)..(3): 2'O-Methyl Cytosine
  modified_base (4)..(4): gm
  modified_base (5)..(5): 2'O-Methyl Adenosine
  modified_base (6)..(6): 2'O-Methyl Cytosine
  modified_base (7)..(8): gm
  modified_base (9)..(9): um
  modified_base (10)..(10): 2'O-Methyl Adenosine
  modified_base (11)..(11): gm
  modified_base (12)..(12): 2'O-Methyl Adenosine
  modified_base (13)..(14): um
  modified_base (15)..(15): 2'O-Methyl Adenosine
  modified_base (16)..(16): um
  modified_base (17)..(19): 2' Fluoro Guanosine
  modified_base (20)..(20): 2'O-Methyl Cytosine
  modified_base (21)..(21): 2'O-Methyl Adenosine
  modified_base (22)..(22): 2' Fluoro Guanosine
  modified_base (23)..(23): um
  modified_base (24)..(24): 2' Fluoro Guanosine
  modified_base (25)..(25): um
  modified_base (26)..(26): 2' Fluoro Guanosine
  modified_base (27)..(27): 2'O-Methyl Adenosine
  modified_base (28)..(29): 2'O-Methyl Cytosine
  modified_base (30)..(30): gm
  modified_base (31)..(31): 2'O-Methyl Cytosine
  modified_base (32)..(32): gm
  modified_base (33)..(34): 2'O-Methyl Cytosine
  misc_feature (35)..(44): 2'O-Methyl deoxyuridine linker
  modified_base (35)..(44): 2'O-Methyl deoxyuridine
  modified_base (45)..(45): gm
  modified_base (46)..(47): 2'O-Methyl Cytosine
  modified_base (48)..(48): gm
  modified_base (49)..(49): 2'O-Methyl Adenosine
  modified_base (50)..(50): 2'O-Methyl Cytosine
  modified_base (51)..(51): um
  modified_base (52)..(53): 2'O-Methyl Cytosine
  modified_base (54)..(54): 2' Fluoro Guanosine
  modified_base (55)..(55): 2'O-Methyl Cytosine
  modified_base (56)..(56): 2' Fluoro Guanosine
  modified_base (57)..(57): 2'O-Methyl Cytosine
  modified_base (58)..(59): 2' Fluoro Guanosine
  modified_base (60)..(60): 2'O-Methyl Adenosine
  modified_base (61)..(62): 2' Fluoro Guanosine
  modified_base (63)..(63): 2'O-Methyl Cytosine
  modified_base (64)..(65): um
  modified_base (66)..(66): 2' Fluoro Guanosine
  modified_base (67)..(67): 2'O-Methyl Adenosine
  modified_base (68)..(69): 2' Fluoro Guanosine
  modified_base (70)..(70): um
  modified_base (71)..(71): 2'O-Methyl Adenosine
  modified_base (72)..(72): 2' Fluoro Guanosine
  modified_base (73)..(74): 2'O-Methyl Cytosine
  modified_base (75)..(75): 2' Fluoro Guanosine
  modified_base (76)..(78): um
  modified_base (79)..(79): gm
  modified_base (80)..(80): um
  modified_base (81)..(81): 2'O-Methyl Cytosine
  modified_base (82)..(83): gm
  modified_base (84)..(84): inverted deoxythymidine incorporated at the 3'  end
  modified_base (84)..(84): 2'O-Methyl Cytosine
ggcgacgguagauuaugggcagugugaccgcgccuuuuuuuuuugccgacuccgcgcggaggcuugagguagccguuugucggc

SEQ ID NO: 121 - RNA, 74 nt, Artificial Sequence
  Aptamer
  modified_base (1)..(1): 2'O-Methyl Cytosine
  modified_base (2)..(2): gm
  modified_base (3)..(3): 2'O-Methyl Adenosine
  modified_base (4)..(4): 2'O-Methyl Cytosine
  modified_base (5)..(5): um
  modified_base (6)..(6): 2'O-Methyl Cytosine
  modified_base (7)..(7): 2'O-Methyl Cytosine
  modified_base (8)..(8): 2' Fluoro Guanosine
  modified_base (9)..(9): 2'O-Methyl Cytosine
  modified_base (10)..(10): 2' Fluoro Guanosine
  modified_base (11)..(11): 2'O-Methyl Cytosine
  modified_base (12)..(13): 2' Fluoro Guanosine
  modified_base (14)..(14): 2'O-Methyl Adenosine
  modified_base (15)..(16): 2' Fluoro Guanosine
  modified_base (17)..(17): 2'O-Methyl Cytosine
  modified_base (18)..(19): um
  modified_base (20)..(20): 2' Fluoro Guanosine
  modified_base (21)..(21): 2'O-Methyl Adenosine
  modified_base (22)..(23): 2' Fluoro Guanosine
  modified_base (24)..(24): um
  modified_base (25)..(25): 2'O-Methyl Adenosine
  modified_base (26)..(26): 2' Fluoro Guanosine
  modified_base (27)..(28): 2'O-Methyl Cytosine
  modified_base (29)..(29): 2' Fluoro Guanosine
  modified_base (30)..(32): um
  modified_base (33)..(33): gm
  modified_base (34)..(34): um
  modified_base (35)..(35): 2'O-Methyl Cytosine
  modified_base (36)..(37): gm
  modified_base (38)..(38): 2'O-Methyl Cytosine
  modified_base (39)..(40): gm
  modified_base (41)..(41): 2'O-Methyl Cytosine
  modified_base (42)..(42): gm
  modified_base (43)..(43): 2'O-Methyl Adenosine
  modified_base (44)..(44): 2'O-Methyl Cytosine
  modified_base (45)..(46): gm
  modified_base (47)..(47): um
  modified_base (48)..(48): 2'O-Methyl Adenosine
  modified_base (49)..(49): gm
  modified_base (50)..(50): 2'O-Methyl Adenosine
  modified_base (51)..(52): um
  modified_base (53)..(53): 2'O-Methyl Adenosine
  modified_base (54)..(54): um
  modified_base (55)..(57): 2' Fluoro Guanosine
  modified_base (58)..(58): 2'O-Methyl Cytosine
  modified_base (59)..(59): 2'O-Methyl Adenosine
  modified_base (60)..(60): 2' Fluoro Guanosine
  modified_base (61)..(61): um
  modified_base (62)..(62): 2' Fluoro Guanosine
  modified_base (63)..(63): um
  modified_base (64)..(64): 2' Fluoro Guanosine
  modified_base (65)..(65): 2'O-Methyl Adenosine
  modified_base (66)..(67): 2'O-Methyl Cytosine
  modified_base (68)..(68): gm
  modified_base (69)..(69): 2'O-Methyl Cytosine
  modified_base (70)..(70): gm
  modified_base (71)..(72): 2'O-Methyl Cytosine
  modified_base (73)..(73): gm
  modified_base (74)..(74): inverted deoxythymidine incorporated at the 3'  end
  modified_base (74)..(74): 2'O-Methyl Cytosine
cgacuccgcgcggaggcuugagguagccguuugucggcggcgacgguagauuaugggcagugugaccgcgccgc

SEQ ID NO: 122 - RNA, 36 nt, Artificial Sequence; identical to SEQ ID NO: 9
  Aptamer
  modified_base (1)..(1): 2'O-Methyl Cytosine
  modified_base (2)..(2): gm
  modified_base (3)..(3): 2'O-Methyl Adenosine
  modified_base (4)..(4): 2'O-Methyl Cytosine
  modified_base (5)..(5): um
  modified_base (6)..(7): 2'O-Methyl Cytosine
  modified_base (8)..(8): 2' Fluoro Guanosine
  modified_base (9)..(9): 2'O-Methyl Cytosine
  modified_base (10)..(10): 2' Fluoro Guanosine
  modified_base (11)..(11): 2'O-Methyl Cytosine
  modified_base (12)..(13): 2' Fluoro Guanosine
  modified_base (14)..(14): 2'O-Methyl Adenosine
  modified_base (15)..(16): 2' Fluoro Guanosine
  modified_base (17)..(17): 2'O-Methyl Cytosine
  modified_base (18)..(19): um
  modified_base (20)..(20): 2' Fluoro Guanosine
  modified_base (21)..(21): 2'O-Methyl Adenosine
  modified_base (22)..(23): 2' Fluoro Guanosine
  modified_base (24)..(24): um
  modified_base (25)..(25): 2'O-Methyl Adenosine
  modified_base (26)..(26): 2' Fluoro Guanosine
  modified_base (27)..(28): 2'O-Methyl Cytosine
  modified_base (29)..(29): 2' Fluoro Guanosine
  modified_base (30)..(32): um
  modified_base (33)..(33): gm
  modified_base (34)..(34): um
  modified_base (35)..(35): 2'O-Methyl Cytosine
  misc_feature (36)..(36): The 2'O-Methyl guanosine is attached  through the linker 1,3-propanediolspacer to 2'O-Methyl guanosine of SEQ ID NO: 427
  modified_base (36)..(36): gm

SEQ ID NO: 123 - RNA, 36 nt, Artificial Sequence; identical to SEQ ID NO: 9
  Aptamer
  modified_base (1)..(1): 2'O-Methyl Cytosine
  modified_base (2)..(2): gm
  modified_base (3)..(3): 2'O-Methyl Adenosine
  modified_base (4)..(4): 2'O-Methyl Cytosine
  modified_base (5)..(5): um
  modified_base (6)..(7): 2'O-Methyl Cytosine
  modified_base (8)..(8): 2' Fluoro Guanosine
  modified_base (9)..(9): 2'O-Methyl Cytosine
  modified_base (10)..(10): 2' Fluoro Guanosine
  modified_base (11)..(11): 2'O-Methyl Cytosine
  modified_base (12)..(13): 2' Fluoro Guanosine
  modified_base (14)..(14): 2'O-Methyl Adenosine
  modified_base (15)..(16): 2' Fluoro Guanosine
  modified_base (17)..(17): 2'O-Methyl Cytosine
  modified_base (18)..(19): um
  modified_base (20)..(20): 2' Fluoro Guanosine
  modified_base (21)..(21): 2'O-Methyl Adenosine
  modified_base (22)..(23): 2' Fluoro Guanosine
  modified_base (24)..(24): um
  modified_base (25)..(25): 2'O-Methyl Adenosine
  modified_base (26)..(26): 2' Fluoro Guanosine
  modified_base (27)..(28): 2'O-Methyl Cytosine
  modified_base (29)..(29): 2' Fluoro Guanosine
  modified_base (30)..(32): um
  modified_base (33)..(33): gm
  modified_base (34)..(34): um
  modified_base (35)..(35): 2'O-Methyl Cytosine
  misc_feature (36)..(36): The 2'O-Methyl cytosine is attached through the linker hexaethylene glycol spacer to 2'O-Methyl guanosine of SEQ ID NO:428
  modified_base (36)..(36): gm

SEQ ID NO: 124 - RNA, 79 nt, Artificial Sequence
  Aptamer
  modified_base (1)..(1): 2'O-Methyl Cytosine
  modified_base (2)..(2): gm
  modified_base (3)..(3): 2'O-Methyl Adenosine
  modified_base (4)..(4): 2'O-Methyl Cytosine
  modified_base (5)..(5): um
  modified_base (6)..(7): 2'O-Methyl Cytosine
  modified_base (8)..(8): 2' Fluoro Guanosine
  modified_base (9)..(9): 2'O-Methyl Cytosine
  modified_base (10)..(10): 2' Fluoro Guanosine
  modified_base (11)..(11): 2'O-Methyl Cytosine
  modified_base (12)..(13): 2' Fluoro Guanosine
  modified_base (14)..(14): 2'O-Methyl Adenosine
  modified_base (15)..(16): 2' Fluoro Guanosine
  modified_base (17)..(17): 2'O-Methyl Cytosine
  modified_base (18)..(19): um
  modified_base (20)..(20): 2' Fluoro Guanosine
  modified_base (21)..(21): 2'O-Methyl Adenosine
  modified_base (22)..(23): 2' Fluoro Guanosine
  modified_base (24)..(24): um
  modified_base (25)..(25): 2'O-Methyl Adenosine
  modified_base (26)..(26): 2' Fluoro Guanosine
  modified_base (27)..(28): 2'O-Methyl Cytosine
  modified_base (29)..(29): 2' Fluoro Guanosine
  modified_base (30)..(32): um
  modified_base (33)..(33): gm
  modified_base (34)..(34): um
  modified_base (35)..(35): 2'O-Methyl Cytosine
  modified_base (36)..(36): gm
  misc_feature (37)..(41): 2'O-Methyl deoxyuridine linker
  modified_base (37)..(41): 2'O-Methyl deoxyuridine
  modified_base (42)..(42): gm
  modified_base (43)..(43): 2'O-Methyl Cytosine
  modified_base (44)..(45): gm
  modified_base (46)..(46): 2'O-Methyl Cytosine
  modified_base (47)..(47): gm
  modified_base (48)..(48): 2'O-Methyl Adenosine
  modified_base (49)..(49): 2'O-Methyl Cytosine
  modified_base (50)..(51): gm
  modified_base (52)..(52): um
  modified_base (53)..(53): 2'O-Methyl Adenosine
  modified_base (54)..(54): gm
  modified_base (55)..(55): 2'O-Methyl Adenosine
  modified_base (56)..(57): um
  modified_base (58)..(58): 2'O-Methyl Adenosine
  modified_base (59)..(59): um
  modified_base (60)..(62): 2' Fluoro Guanosine
  modified_base (63)..(63): 2'O-Methyl Cytosine
  modified_base (64)..(64): 2'O-Methyl Adenosine
  modified_base (65)..(65): 2' Fluoro Guanosine
  modified_base (66)..(66): um
  modified_base (67)..(67): 2' Fluoro Guanosine
  modified_base (68)..(68): um
  modified_base (69)..(69): 2' Fluoro Guanosine
  modified_base (70)..(70): 2'O-Methyl Adenosine
  modified_base (71)..(72): 2'O-Methyl Cytosine
  modified_base (73)..(73): gm
  modified_base (74)..(74): 2'O-Methyl Cytosine
  modified_base (75)..(75): gm
  modified_base (76)..(77): 2'O-Methyl Cytosine
  modified_base (78)..(78): gm
  modified_base (79)..(79): inverted deoxythymidine incorporated at the 3'  end
  modified_base (79)..(79): 2'O-Methyl Cytosine
cgacuccgcgcggaggcuugagguagccguuugucguuuuugcggcgacgguagauuaugggcagugugaccgcgccgc

SEQ ID NO: 125 - RNA, 84 nt, Artificial Sequence
  Aptamer
  modified_base (1)..(1): 2'O-Methyl Cytosine
  modified_base (2)..(2): gm
  modified_base (3)..(3): 2'O-Methyl Adenosine
  modified_base (4)..(4): 2'O-Methyl Cytosine
  modified_base (5)..(5): um
  modified_base (6)..(7): 2'O-Methyl Cytosine
  modified_base (8)..(8): 2' Fluoro Guanosine
  modified_base (9)..(9): 2'O-Methyl Cytosine
  modified_base (10)..(10): 2' Fluoro Guanosine
  modified_base (11)..(11): 2'O-Methyl Cytosine
  modified_base (12)..(13): 2' Fluoro Guanosine
  modified_base (14)..(14): 2'O-Methyl Adenosine
  modified_base (15)..(16): 2' Fluoro Guanosine
  modified_base (17)..(17): 2'O-Methyl Cytosine
  modified_base (18)..(19): um
  modified_base (20)..(20): 2' Fluoro Guanosine
  modified_base (21)..(21): 2'O-Methyl Adenosine
  modified_base (22)..(23): 2' Fluoro Guanosine
  modified_base (24)..(24): um
  modified_base (25)..(25): 2'O-Methyl Adenosine
  modified_base (26)..(26): 2' Fluoro Guanosine
  modified_base (27)..(28): 2'O-Methyl Cytosine
  modified_base (29)..(29): 2' Fluoro Guanosine
  modified_base (30)..(32): um
  modified_base (33)..(33): gm
  modified_base (34)..(34): um
  modified_base (35)..(35): 2'O-Methyl Cytosine
  modified_base (36)..(36): gm
  misc_feature (37)..(46): 2'O-Methyl deoxyuridine linker
  modified_base (37)..(46): 2'O-Methyl deoxyuridine
  modified_base (47)..(47): gm
  modified_base (48)..(48): 2'O-Methyl Cytosine
  modified_base (49)..(50): gm
  modified_base (51)..(51): 2'O-Methyl Cytosine
  modified_base (52)..(52): gm
  modified_base (53)..(53): 2'O-Methyl Adenosine
  modified_base (54)..(54): 2'O-Methyl Cytosine
  modified_base (55)..(56): gm
  modified_base (57)..(57): um
  modified_base (58)..(58): 2'O-Methyl Adenosine
  modified_base (59)..(59): gm
  modified_base (60)..(60): 2'O-Methyl Adenosine
  modified_base (61)..(62): um
  modified_base (63)..(63): 2'O-Methyl Adenosine
  modified_base (64)..(64): um
  modified_base (65)..(67): 2' Fluoro Guanosine
  modified_base (68)..(68): 2'O-Methyl Cytosine
  modified_base (69)..(69): 2'O-Methyl Adenosine
  modified_base (70)..(70): 2' Fluoro Guanosine
  modified_base (71)..(71): um
  modified_base (72)..(72): 2' Fluoro Guanosine
  modified_base (73)..(73): um
  modified_base (74)..(74): 2' Fluoro Guanosine
  modified_base (75)..(75): 2'O-Methyl Adenosine
  modified_base (76)..(77): 2'O-Methyl Cytosine
  modified_base (78)..(78): gm
  modified_base (79)..(79): 2'O-Methyl Cytosine
  modified_base (80)..(80): gm
  modified_base (81)..(82): 2'O-Methyl Cytosine
  modified_base (83)..(83): gm
  modified_base (84)..(84): inverted deoxythymidine incorporated at the 3'  end
  modified_base (84)..(84): 2'O-Methyl Cytosine
cgacuccgcgcggaggcuugagguagccguuugucguuuuuuuuuugcggcgacgguagauuaugggcagugugaccgcgccgc

SEQ ID NO: 126 - RNA, 74 nt, Artificial Sequence; identical to SEQ ID NO: 116
  Aptamer
  modified_base (1)..(2): gm
  modified_base (3)..(3): 2'O-Methyl Cytosine
  modified_base (4)..(4): gm
  modified_base (5)..(5): 2'O-Methyl Adenosine
  modified_base (6)..(6): 2'O-Methyl Cytosine
  modified_base (7)..(8): gm
  modified_base (9)..(9): um
  modified_base (10)..(10): 2'O-Methyl Adenosine
  modified_base (11)..(11): gm
  modified_base (12)..(12): 2'O-Methyl Adenosine
  modified_base (13)..(14): um
  modified_base (15)..(15): 2'O-Methyl Adenosine
  modified_base (16)..(16): um
  modified_base (17)..(19): 2' Fluoro Guanosine
  modified_base (20)..(20): 2'O-Methyl Cytosine
  modified_base (21)..(21): 2'O-Methyl Adenosine
  modified_base (22)..(22): 2' Fluoro Guanosine
  modified_base (23)..(23): um
  modified_base (24)..(24): 2' Fluoro Guanosine
  modified_base (25)..(25): um
  modified_base (26)..(26): 2' Fluoro Guanosine
  modified_base (27)..(27): 2'O-Methyl Adenosine
  modified_base (28)..(29): 2'O-Methyl Cytosine
  modified_base (30)..(30): gm
  modified_base (31)..(31): 2'O-Methyl Cytosine
  modified_base (32)..(32): gm
  modified_base (33)..(34): 2'O-Methyl Cytosine
  modified_base (35)..(35): gm
  modified_base (36)..(37): 2'O-Methyl Cytosine
  modified_base (38)..(38): gm
  modified_base (39)..(39): 2'O-Methyl Adenosine
  modified_base (40)..(40): 2'O-Methyl Cytosine
  modified_base (41)..(41): um
  modified_base (42)..(43): 2'O-Methyl Cytosine
  modified_base (44)..(44): 2' Fluoro Guanosine
  modified_base (45)..(45): 2'O-Methyl Cytosine
  modified_base (46)..(46): 2' Fluoro Guanosine
  modified_base (47)..(47): 2'O-Methyl Cytosine
  modified_base (48)..(49): 2' Fluoro Guanosine
  modified_base (50)..(50): 2'O-Methyl Adenosine
  modified_base (51)..(52): 2' Fluoro Guanosine
  modified_base (53)..(53): 2'O-Methyl Cytosine
  modified_base (54)..(55): um
  modified_base (56)..(56): 2' Fluoro Guanosine
  modified_base (57)..(57): 2'O-Methyl Adenosine
  modified_base (58)..(59): 2' Fluoro Guanosine
  modified_base (60)..(60): um
  modified_base (61)..(61): 2'O-Methyl Adenosine
  modified_base (62)..(62): 2' Fluoro Guanosine
  modified_base (63)..(64): 2'O-Methyl Cytosine
  modified_base (65)..(65): 2' Fluoro Guanosine
  modified_base (66)..(68): um
  modified_base (69)..(69): gm
  modified_base (70)..(70): um
  modified_base (71)..(71): 2'O-Methyl Cytosine
  modified_base (72)..(73): gm
  modified_base (74)..(74): inverted deoxythymidine incorporated at the 3'  end
  modified_base (74)..(74): 2'O-Methyl Cytosine

SEQ ID NO: 127 - RNA, 34 nt, Artificial Sequence; identical to SEQ ID NO: 48
  Aptamer
  modified_base (1)..(2): gm
  modified_base (3)..(3): 2'O-Methyl Cytosine
  modified_base (4)..(4): gm
  modified_base (5)..(5): 2'O-Methyl Adenosine
  modified_base (6)..(6): 2'O-Methyl Cytosine
  modified_base (7)..(8): gm
  modified_base (9)..(9): um
  modified_base (10)..(10): 2'O-Methyl Adenosine
  modified_base (11)..(11): gm
  modified_base (12)..(12): 2'O-Methyl Adenosine
  modified_base (13)..(14): um
  modified_base (15)..(15): 2'O-Methyl Adenosine
  modified_base (16)..(16): um
  modified_base (17)..(19): 2' Fluoro Guanosine
  modified_base (20)..(20): 2'O-Methyl Cytosine
  modified_base (21)..(21): 2'O-Methyl Adenosine
  modified_base (22)..(22): 2' Fluoro Guanosine
  modified_base (23)..(23): um
  modified_base (24)..(24): 2' Fluoro Guanosine
  modified_base (25)..(25): um
  modified_base (26)..(26): 2' Fluoro Guanosine
  modified_base (27)..(27): 2'O-Methyl Adenosine
  modified_base (28)..(29): 2'O-Methyl Cytosine
  modified_base (30)..(30): gm
  modified_base (31)..(31): 2'O-Methyl Cytosine
  modified_base (32)..(32): gm
  modified_base (33)..(34): 2'O-Methyl Cytosine
  misc_feature (34)..(34): The 2'O-Methyl cytosine is attached  through the linker 1,3-propanediolspacer to 2'O-Methyl guanosine of SEQ ID NO: 429

SEQ ID NO: 128 - RNA, 34 nt, Artificial Sequence; identical to SEQ ID NO: 48
  Aptamer
  modified_base (1)..(2): gm
  modified_base (3)..(3): 2'O-Methyl Cytosine
  modified_base (4)..(4): gm
  modified_base (5)..(5): 2'O-Methyl Adenosine
  modified_base (6)..(6): 2'O-Methyl Cytosine
  modified_base (7)..(8): gm
  modified_base (9)..(9): um
  modified_base (10)..(10): 2'O-Methyl Adenosine
  modified_base (11)..(11): gm
  modified_base (12)..(12): 2'O-Methyl Adenosine
  modified_base (13)..(14): um
  modified_base (15)..(15): 2'O-Methyl Adenosine
  modified_base (16)..(16): um
  modified_base (17)..(19): 2' Fluoro Guanosine
  modified_base (20)..(20): 2'O-Methyl Cytosine
  modified_base (21)..(21): 2'O-Methyl Adenosine
  modified_base (22)..(22): 2' Fluoro Guanosine
  modified_base (23)..(23): um
  modified_base (24)..(24): 2' Fluoro Guanosine
  modified_base (25)..(25): um
  modified_base (26)..(26): 2' Fluoro Guanosine
  modified_base (27)..(27): 2'O-Methyl Adenosine
  modified_base (28)..(29): 2'O-Methyl Cytosine
  modified_base (30)..(30): gm
  modified_base (31)..(31): 2'O-Methyl Cytosine
  modified_base (32)..(32): gm
  modified_base (33)..(34): 2'O-Methyl Cytosine
  misc_feature (34)..(34): The 2'O-Methyl cytosine is attached through the linker hexaethylene glycol spacer to 2'O-Methyl guanosine of SEQ ID NO:430

SEQ ID NO: 129 - RNA, 79 nt, Artificial Sequence; identical to SEQ ID NO: 119
  Aptamer
  modified_base (1)..(2): gm
  modified_base (3)..(3): 2'O-Methyl Cytosine
  modified_base (4)..(4): gm
  modified_base (5)..(5): 2'O-Methyl Adenosine
  modified_base (6)..(6): 2'O-Methyl Cytosine
  modified_base (7)..(8): gm
  modified_base (9)..(9): um
  modified_base (10)..(10): 2'O-Methyl Adenosine
  modified_base (11)..(11): gm
  modified_base (12)..(12): 2'O-Methyl Adenosine
  modified_base (13)..(14): um
  modified_base (15)..(15): 2'O-Methyl Adenosine
  modified_base (16)..(16): um
  modified_base (17)..(19): 2' Fluoro Guanosine
  modified_base (20)..(20): 2'O-Methyl Cytosine
  modified_base (21)..(21): 2'O-Methyl Adenosine
  modified_base (22)..(22): 2' Fluoro Guanosine
  modified_base (23)..(23): um
  modified_base (24)..(24): 2' Fluoro Guanosine
  modified_base (25)..(25): um
  modified_base (26)..(26): 2' Fluoro Guanosine
  modified_base (27)..(27): 2'O-Methyl Adenosine
  modified_base (28)..(29): 2'O-Methyl Cytosine
  modified_base (30)..(30): gm
  modified_base (31)..(31): 2'O-Methyl Cytosine
  modified_base (32)..(32): gm
  modified_base (33)..(34): 2'O-Methyl Cytosine
  misc_feature (35)..(39): 2'O-Methyl deoxyuridine linker
  modified_base (35)..(39): 2'O-Methyl deoxyuridine
  modified_base (40)..(40): gm
  modified_base (41)..(42): 2'O-Methyl Cytosine
  modified_base (43)..(43): gm
  modified_base (44)..(44): 2'O-Methyl Adenosine
  modified_base (45)..(45): 2'O-Methyl Cytosine
  modified_base (46)..(46): um
  modified_base (47)..(48): 2'O-Methyl Cytosine
  modified_base (49)..(49): 2' Fluoro Guanosine
  modified_base (50)..(50): 2'O-Methyl Cytosine
  modified_base (51)..(51): 2' Fluoro Guanosine
  modified_base (52)..(52): 2'O-Methyl Cytosine
  modified_base (53)..(54): 2' Fluoro Guanosine
  modified_base (55)..(55): 2'O-Methyl Adenosine
  modified_base (56)..(57): 2' Fluoro Guanosine
  modified_base (58)..(58): 2'O-Methyl Cytosine
  modified_base (59)..(60): um
  modified_base (61)..(61): 2' Fluoro Guanosine
  modified_base (62)..(62): 2'O-Methyl Adenosine
  modified_base (63)..(64): 2' Fluoro Guanosine
  modified_base (65)..(65): um
  modified_base (66)..(66): 2'O-Methyl Adenosine
  modified_base (67)..(67): 2' Fluoro Guanosine
  modified_base (68)..(69): 2'O-Methyl Cytosine
  modified_base (70)..(70): 2' Fluoro Guanosine
  modified_base (71)..(73): um
  modified_base (74)..(74): gm
  modified_base (75)..(75): um
  modified_base (76)..(76): 2'O-Methyl Cytosine
  modified_base (77)..(78): gm
  modified_base (79)..(79): inverted deoxythymidine incorporated at the 3'  end
  modified_base (79)..(79): 2'O-Methyl Cytosine

SEQ ID NO: 130 - RNA, 84 nt, Artificial Sequence; identical to SEQ ID NO: 120
  Aptamer
  modified_base (1)..(2): gm
  modified_base (3)..(3): 2'O-Methyl Cytosine
  modified_base (4)..(4): gm
  modified_base (5)..(5): 2'O-Methyl Adenosine
  modified_base (6)..(6): 2'O-Methyl Cytosine
  modified_base (7)..(8): gm
  modified_base (9)..(9): um
  modified_base (10)..(10): 2'O-Methyl Adenosine
  modified_base (11)..(11): gm
  modified_base (12)..(12): 2'O-Methyl Adenosine
  modified_base (13)..(14): um
  modified_base (15)..(15): 2'O-Methyl Adenosine
  modified_base (16)..(16): um
  modified_base (17)..(19): 2' Fluoro Guanosine
  modified_base (20)..(20): 2'O-Methyl Cytosine
  modified_base (21)..(21): 2'O-Methyl Adenosine
  modified_base (22)..(22): 2' Fluoro Guanosine
  modified_base (23)..(23): um
  modified_base (24)..(24): 2' Fluoro Guanosine
  modified_base (25)..(25): um
  modified_base (26)..(26): 2' Fluoro Guanosine
  modified_base (27)..(27): 2'O-Methyl Adenosine
  modified_base (28)..(29): 2'O-Methyl Cytosine
  modified_base (30)..(30): gm
  modified_base (31)..(31): 2'O-Methyl Cytosine
  modified_base (32)..(32): gm
  modified_base (33)..(34): 2'O-Methyl Cytosine
  misc_feature (35)..(44): 2'O-Methyl deoxyuridine linker
  modified_base (35)..(44): 2'O-Methyl deoxyuridine
  modified_base (45)..(45): gm
  modified_base (46)..(47): 2'O-Methyl Cytosine
  modified_base (48)..(48): gm
  modified_base (49)..(49): 2'O-Methyl Adenosine
  modified_base (50)..(50): 2'O-Methyl Cytosine
  modified_base (51)..(51): um
  modified_base (52)..(53): 2'O-Methyl Cytosine
  modified_base (54)..(54): 2' Fluoro Guanosine
  modified_base (55)..(55): 2'O-Methyl Cytosine
  modified_base (56)..(56): 2' Fluoro Guanosine
  modified_base (57)..(57): 2'O-Methyl Cytosine
  modified_base (58)..(59): 2' Fluoro Guanosine
  modified_base (60)..(60): 2'O-Methyl Adenosine
  modified_base (61)..(62): 2' Fluoro Guanosine
  modified_base (63)..(63): 2'O-Methyl Cytosine
  modified_base (64)..(65): um
  modified_base (66)..(66): 2' Fluoro Guanosine
  modified_base (67)..(67): 2'O-Methyl Adenosine
  modified_base (68)..(69): 2' Fluoro Guanosine
  modified_base (70)..(70): um
  modified_base (71)..(71): 2'O-Methyl Adenosine
  modified_base (72)..(72): 2' Fluoro Guanosine
  modified_base (73)..(74): 2'O-Methyl Cytosine
  modified_base (75)..(75): 2' Fluoro Guanosine
  modified_base (76)..(78): um
  modified_base (79)..(79): gm
  modified_base (80)..(80): um
  modified_base (81)..(81): 2'O-Methyl Cytosine
  modified_base (82)..(83): gm
  modified_base (84)..(84): inverted deoxythymidine incorporated at the 3'  end
  modified_base (84)..(84): 2'O-Methyl Cytosine

SEQ ID NO: 131 - RNA, 78 nt, Artificial Sequence
  Aptamer
  modified_base (1)..(1): gm
  modified_base (2)..(3): 2'O-Methyl Cytosine
  modified_base (4)..(4): gm
  modified_base (5)..(5): 2'O-Methyl Adenosine
  modified_base (6)..(6): 2'O-Methyl Cytosine
  modified_base (7)..(7): um
  modified_base (8)..(9): 2'O-Methyl Cytosine
  modified_base (10)..(10): 2' Fluoro Guanosine
  modified_base (11)..(11): 2'O-Methyl Cytosine
  modified_base (12)..(12): 2' Fluoro Guanosine
  modified_base (13)..(13): 2'O-Methyl Cytosine
  modified_base (14)..(15): 2' Fluoro Guanosine
  modified_base (16)..(16): 2'O-Methyl Adenosine
  modified_base (17)..(18): 2' Fluoro Guanosine
  modified_base (19)..(19): 2'O-Methyl Cytosine
  modified_base (20)..(21): um
  modified_base (22)..(22): 2' Fluoro Guanosine
  modified_base (23)..(23): 2'O-Methyl Adenosine
  modified_base (24)..(25): 2' Fluoro Guanosine
  modified_base (26)..(26): um
  modified_base (27)..(27): 2'O-Methyl Adenosine
  modified_base (28)..(28): 2' Fluoro Guanosine
  modified_base (29)..(30): 2'O-Methyl Cytosine
  modified_base (31)..(31): 2' Fluoro Guanosine
  modified_base (32)..(34): um
  modified_base (35)..(35): gm
  modified_base (36)..(36): um
  modified_base (37)..(37): 2'O-Methyl Cytosine
  modified_base (38)..(39): gm
  modified_base (40)..(40): 2'O-Methyl Cytosine
  modified_base (41)..(41): gm
  modified_base (42)..(42): 2'O-Methyl Cytosine
  modified_base (43)..(44): gm
  modified_base (45)..(45): 2'O-Methyl Cytosine
  modified_base (46)..(46): gm
  modified_base (47)..(47): 2'O-Methyl Adenosine
  modified_base (48)..(48): 2'O-Methyl Cytosine
  modified_base (49)..(50): gm
  modified_base (51)..(51): um
  modified_base (52)..(52): 2'O-Methyl Adenosine
  modified_base (53)..(53): gm
  modified_base (54)..(54): 2'O-Methyl Adenosine
  modified_base (55)..(56): um
  modified_base (57)..(57): 2'O-Methyl Adenosine
  modified_base (58)..(58): um
  modified_base (59)..(61): 2' Fluoro Guanosine
  modified_base (62)..(62): 2'O-Methyl Cytosine
  modified_base (63)..(63): 2'O-Methyl Adenosine
  modified_base (64)..(64): 2' Fluoro Guanosine
  modified_base (65)..(65): um
  modified_base (66)..(66): 2' Fluoro Guanosine
  modified_base (67)..(67): um
  modified_base (68)..(68): 2' Fluoro Guanosine
  modified_base (69)..(69): 2'O-Methyl Adenosine
  modified_base (70)..(71): 2'O-Methyl Cytosine
  modified_base (72)..(72): gm
  modified_base (73)..(73): 2'O-Methyl Cytosine
  modified_base (74)..(74): gm
  modified_base (75)..(76): 2'O-Methyl Cytosine
  modified_base (77)..(77): gm
  modified_base (78)..(78): inverted deoxythymidine incorporated at the 3'  end
  modified_base (78)..(78): 2'O-Methyl Cytosine
gccgacuccgcgcggaggcuugagguagccguuugucggcgcggcgacgguagauuaugggcagugugaccgcgccgc

SEQ ID NO: 132 - RNA, 40 nt, Artificial Sequence; identical to SEQ ID NO: 110
  Aptamer
  modified_base (1)..(1): gm
  modified_base (2)..(3): 2'O-Methyl Cytosine
  modified_base (4)..(4): gm
  modified_base (5)..(5): 2'O-Methyl Adenosine
  modified_base (6)..(6): 2'O-Methyl Cytosine
  modified_base (7)..(7): um
  modified_base (8)..(9): 2'O-Methyl Cytosine
  modified_base (10)..(10): 2' Fluoro Guanosine
  modified_base (11)..(11): 2'O-Methyl Cytosine
  modified_base (12)..(12): 2' Fluoro Guanosine
  modified_base (13)..(13): 2'O-Methyl Cytosine
  modified_base (14)..(15): 2' Fluoro Guanosine
  modified_base (16)..(16): 2'O-Methyl Adenosine
  modified_base (17)..(18): 2' Fluoro Guanosine
  modified_base (19)..(19): 2'O-Methyl Cytosine
  modified_base (20)..(21): um
  modified_base (22)..(22): 2' Fluoro Guanosine
  modified_base (23)..(23): 2'O-Methyl Adenosine
  modified_base (24)..(25): 2' Fluoro Guanosine
  modified_base (26)..(26): um
  modified_base (27)..(27): 2'O-Methyl Adenosine
  modified_base (28)..(28): 2' Fluoro Guanosine
  modified_base (29)..(30): 2'O-Methyl Cytosine
  modified_base (31)..(31): 2' Fluoro Guanosine
  modified_base (32)..(34): um
  modified_base (35)..(35): gm
  modified_base (36)..(36): um
  modified_base (37)..(37): 2'O-Methyl Cytosine
  modified_base (38)..(39): gm
  misc_feature (40)..(40): The 2'O-Methyl cytosine is attached  through the linker 1,3-propanediolspacer to 2'O-Methyl guanosine of SEQ ID NO: 431
  modified_base (40)..(40): 2'O-Methyl Cytosine

SEQ ID NO: 133 - RNA, 40 nt, Artificial Sequence; identical to SEQ ID NO: 110
  Aptamer
  modified_base (1)..(1): gm
  modified_base (2)..(3): 2'O-Methyl Cytosine
  modified_base (4)..(4): gm
  modified_base (5)..(5): 2'O-Methyl Adenosine
  modified_base (6)..(6): 2'O-Methyl Cytosine
  modified_base (7)..(7): um
  modified_base (8)..(9): 2'O-Methyl Cytosine
  modified_base (10)..(10): 2' Fluoro Guanosine
  modified_base (11)..(11): 2'O-Methyl Cytosine
  modified_base (12)..(12): 2' Fluoro Guanosine
  modified_base (13)..(13): 2'O-Methyl Cytosine
  modified_base (14)..(15): 2' Fluoro Guanosine
  modified_base (16)..(16): 2'O-Methyl Adenosine
  modified_base (17)..(18): 2' Fluoro Guanosine
  modified_base (19)..(19): 2'O-Methyl Cytosine
  modified_base (20)..(21): um
  modified_base (22)..(22): 2' Fluoro Guanosine
  modified_base (23)..(23): 2'O-Methyl Adenosine
  modified_base (24)..(25): 2' Fluoro Guanosine
  modified_base (26)..(26): um
  modified_base (27)..(27): 2'O-Methyl Adenosine
  modified_base (28)..(28): 2' Fluoro Guanosine
  modified_base (29)..(30): 2'O-Methyl Cytosine
  modified_base (32)..(34): um
  modified_base (33)..(33): 2' Fluoro Guanosine
  modified_base (35)..(35): gm
  modified_base (36)..(36): um
  modified_base (37)..(37): 2'O-Methyl Cytosine
  modified_base (38)..(39): gm
  modified_base (40)..(40): The 2'O-Methyl cytosine is attached through the linker hexaethylene glycol spacer to 2'O-Methyl guanosine of SEQ ID NO:432
  modified_base (40)..(40): 2'O-Methyl Cytosine

SEQ ID NO: 134 - RNA, 83 nt, Artificial Sequence
  Aptamer
  modified_base (1)..(1): gm
  modified_base (2)..(3): 2'O-Methyl Cytosine
  modified_base (4)..(4): gm
  modified_base (5)..(5): 2'O-Methyl Adenosine
  modified_base (6)..(6): 2'O-Methyl Cytosine
  modified_base (7)..(7): um
  modified_base (8)..(9): 2'O-Methyl Cytosine
  modified_base (10)..(10): 2' Fluoro Guanosine
  modified_base (11)..(11): 2'O-Methyl Cytosine
  modified_base (12)..(12): 2' Fluoro Guanosine
  modified_base (13)..(13): 2'O-Methyl Cytosine
  modified_base (14)..(15): 2' Fluoro Guanosine
  modified_base (16)..(16): 2'O-Methyl Adenosine
  modified_base (17)..(18): 2' Fluoro Guanosine
  modified_base (19)..(19): 2'O-Methyl Cytosine
  modified_base (20)..(21): um
  modified_base (22)..(22): 2' Fluoro Guanosine
  modified_base (23)..(23): 2'O-Methyl Adenosine
  modified_base (24)..(25): 2' Fluoro Guanosine
  modified_base (26)..(26): um
  modified_base (27)..(27): 2'O-Methyl Adenosine
  modified_base (28)..(28): 2' Fluoro Guanosine
  modified_base (29)..(30): 2'O-Methyl Cytosine
  modified_base (31)..(31): 2' Fluoro Guanosine
  modified_base (32)..(34): um
  modified_base (35)..(35): gm
  modified_base (36)..(36): um
  modified_base (37)..(37): 2'O-Methyl Cytosine
  modified_base (38)..(39): gm
  modified_base (40)..(40): 2'O-Methyl Cytosine
  misc_feature (41)..(45): 2'O-Methyl deoxyuridine linker
  modified_base (41)..(45): 2'O-Methyl deoxyuridine
  modified_base (46)..(46): gm
  modified_base (47)..(47): 2'O-Methyl Cytosine
  modified_base (48)..(49): gm
  modified_base (50)..(50): 2'O-Methyl Cytosine
  modified_base (51)..(51): gm
  modified_base (52)..(52): 2'O-Methyl Adenosine
  modified_base (53)..(53): 2'O-Methyl Cytosine
  modified_base (54)..(55): gm
  modified_base (56)..(56): um
  modified_base (57)..(57): 2'O-Methyl Adenosine
  modified_base (58)..(58): gm
  modified_base (59)..(59): 2'O-Methyl Adenosine
  modified_base (60)..(61): um
  modified_base (62)..(62): 2'O-Methyl Adenosine
  modified_base (63)..(63): um
  modified_base (64)..(66): 2' Fluoro Guanosine
  modified_base (67)..(67): 2'O-Methyl Cytosine
  modified_base (68)..(68): 2'O-Methyl Adenosine
  modified_base (69)..(69): 2' Fluoro Guanosine
  modified_base (70)..(70): um
  modified_base (71)..(71): 2' Fluoro Guanosine
  modified_base (72)..(72): um
  modified_base (73)..(73): 2' Fluoro Guanosine
  modified_base (74)..(74): 2'O-Methyl Adenosine
  modified_base (75)..(76): 2'O-Methyl Cytosine
  modified_base (77)..(77): gm
  modified_base (78)..(78): 2'O-Methyl Cytosine
  modified_base (79)..(79): gm
  modified_base (80)..(81): 2'O-Methyl Cytosine
  modified_base (82)..(82): gm
  modified_base (83)..(83): inverted deoxythymidine incorporated at the 3'  end
  modified_base (83)..(83): 2'O-Methyl Cytosine
gccgacuccgcgcggaggcuugagguagccguuugucggcuuuuugcggcgacgguagauuaugggcagugugaccgcgccgc

SEQ ID NO: 135 - RNA, 88 nt, Artificial Sequence
  Aptamer
  modified_base (1)..(1): gm
  modified_base (2)..(3): 2'O-Methyl Cytosine
  modified_base (4)..(4): gm
  modified_base (5)..(5): 2'O-Methyl Adenosine
  modified_base (6)..(6): 2'O-Methyl Cytosine
  modified_base (7)..(7): um
  modified_base (8)..(9): 2'O-Methyl Cytosine
  modified_base (10)..(10): 2' Fluoro Guanosine
  modified_base (11)..(11): 2'O-Methyl Cytosine
  modified_base (12)..(12): 2' Fluoro Guanosine
  modified_base (13)..(13): 2'O-Methyl Cytosine
  modified_base (14)..(15): 2' Fluoro Guanosine
  modified_base (16)..(16): 2'O-Methyl Adenosine
  modified_base (17)..(18): 2' Fluoro Guanosine
  modified_base (19)..(19): 2'O-Methyl Cytosine
  modified_base (20)..(21): um
  modified_base (22)..(22): 2' Fluoro Guanosine
  modified_base (23)..(23): 2'O-Methyl Adenosine
  modified_base (24)..(25): 2' Fluoro Guanosine
  modified_base (26)..(26): um
  modified_base (27)..(27): 2'O-Methyl Adenosine
  modified_base (28)..(28): 2' Fluoro Guanosine
  modified_base (29)..(30): 2'O-Methyl Cytosine
  modified_base (31)..(31): 2' Fluoro Guanosine
  modified_base (32)..(34): um
  modified_base (35)..(35): gm
  modified_base (36)..(36): um
  modified_base (37)..(37): 2'O-Methyl Cytosine
  modified_base (38)..(39): gm
  modified_base (40)..(40): 2'O-Methyl Cytosine
  misc_feature (41)..(50): 2'O-Methyl deoxyuridine linker
  modified_base (41)..(50): 2'O-Methyl deoxyuridine
  modified_base (51)..(51): gm
  modified_base (52)..(52): 2'O-Methyl Cytosine
  modified_base (52)..(52): 2'O-Methyl Cytosine
  modified_base (53)..(54): gm
  modified_base (55)..(55): 2'O-Methyl Cytosine
  modified_base (56)..(56): gm
  modified_base (57)..(57): 2'O-Methyl Adenosine
  modified_base (58)..(58): 2'O-Methyl Cytosine
  modified_base (59)..(60): gm
  modified_base (61)..(61): um
  modified_base (62)..(62): 2'O-Methyl Adenosine
  modified_base (63)..(63): gm
  modified_base (64)..(64): 2'O-Methyl Adenosine
  modified_base (65)..(66): um
  modified_base (67)..(67): 2'O-Methyl Adenosine
  modified_base (68)..(68): um
  modified_base (69)..(71): 2' Fluoro Guanosine
  modified_base (72)..(72): 2'O-Methyl Cytosine
  modified_base (73)..(73): 2'O-Methyl Adenosine
  modified_base (74)..(74): 2' Fluoro Guanosine
  modified_base (75)..(75): um
  modified_base (76)..(76): 2' Fluoro Guanosine
  modified_base (77)..(77): um
  modified_base (78)..(78): 2' Fluoro Guanosine
  modified_base (79)..(79): 2'O-Methyl Adenosine
  modified_base (80)..(81): 2'O-Methyl Cytosine
  modified_base (82)..(82): gm
  modified_base (83)..(83): 2'O-Methyl Cytosine
  modified_base (84)..(84): gm
  modified_base (85)..(86): 2'O-Methyl Cytosine
  modified_base (87)..(87): gm
  modified_base (88)..(88): inverted deoxythymidine incorporated at the 3'  end
  modified_base (88)..(88): 2'O-Methyl Cytosine
gccgacuccgcgcggaggcuugagguagccguuugucggcuuuuuuuuuugcggcgacgguagauuaugggcagugugaccgcgccgc

SEQ ID NO: 136 - RNA, 78 nt, Artificial Sequence
  Aptamer
  modified_base (1)..(1): gm
  modified_base (2)..(2): 2'O-Methyl Cytosine
  modified_base (3)..(4): gm
  modified_base (5)..(5): 2'O-Methyl Cytosine
  modified_base (6)..(6): gm
  modified_base (7)..(7): 2'O-Methyl Adenosine
  modified_base (8)..(8): 2'O-Methyl Cytosine
  modified_base (9)..(10): gm
  modified_base (11)..(11): um
  modified_base (12)..(12): 2'O-Methyl Adenosine
  modified_base (13)..(13): gm
  modified_base (14)..(14): 2'O-Methyl Adenosine
  modified_base (15)..(16): um
  modified_base (17)..(17): 2'O-Methyl Adenosine
  modified_base (18)..(18): um
  modified_base (19)..(21): 2' Fluoro Guanosine
  modified_base (22)..(22): 2'O-Methyl Cytosine
  modified_base (23)..(23): 2'O-Methyl Adenosine
  modified_base (24)..(24): 2' Fluoro Guanosine
  modified_base (25)..(25): um
  modified_base (26)..(26): 2' Fluoro Guanosine
  modified_base (27)..(27): um
  modified_base (28)..(28): 2' Fluoro Guanosine
  modified_base (29)..(29): 2'O-Methyl Adenosine
  modified_base (30)..(31): 2'O-Methyl Cytosine
  modified_base (32)..(32): gm
  modified_base (33)..(33): 2'O-Methyl Cytosine
  modified_base (34)..(34): gm
  modified_base (35)..(36): 2'O-Methyl Cytosine
  modified_base (37)..(37): gm
  modified_base (38)..(38): 2'O-Methyl Cytosine
  modified_base (39)..(39): gm
  modified_base (40)..(41): 2'O-Methyl Cytosine
  modified_base (42)..(42): gm
  modified_base (43)..(43): 2'O-Methyl Adenosine
  modified_base (44)..(44): 2'O-Methyl Cytosine
  modified_base (45)..(45): um
  modified_base (46)..(47): 2'O-Methyl Cytosine
  modified_base (48)..(48): 2' Fluoro Guanosine
  modified_base (49)..(49): 2'O-Methyl Cytosine
  modified_base (50)..(50): 2' Fluoro Guanosine
  modified_base (51)..(51): 2'O-Methyl Cytosine
  modified_base (52)..(53): 2' Fluoro Guanosine
  modified_base (54)..(54): 2'O-Methyl Adenosine
  modified_base (55)..(56): 2' Fluoro Guanosine
  modified_base (57)..(57): 2'O-Methyl Cytosine
  modified_base (58)..(59): um
  modified_base (60)..(60): 2' Fluoro Guanosine
  modified_base (61)..(61): 2'O-Methyl Adenosine
  modified_base (62)..(63): 2' Fluoro Guanosine
  modified_base (64)..(64): um
  modified_base (65)..(65): 2'O-Methyl Adenosine
  modified_base (66)..(66): 2' Fluoro Guanosine
  modified_base (67)..(68): 2'O-Methyl Cytosine
  modified_base (69)..(69): 2' Fluoro Guanosine
  modified_base (69)..(69): gm
  modified_base (70)..(72): um
  modified_base (73)..(73): gm
  modified_base (74)..(74): um
  modified_base (75)..(75): 2'O-Methyl Cytosine
  modified_base (76)..(77): gm
  modified_base (78)..(78): inverted deoxythymidine incorporated at the 3'  end
  modified_base (78)..(78): 2'O-Methyl Cytosine
gcggcgacgguagauuaugggcagugugaccgcgccgcgccgacuccgcgcggaggcuugagguagccguuugucggc

SEQ ID NO: 137 - RNA, 78 nt, Artificial Sequence; identical to SEQ ID NO: 136
  Aptamer
  modified_base (1)..(1): gm
  modified_base (2)..(2): 2'O-Methyl Cytosine
  modified_base (3)..(4): gm
  modified_base (5)..(5): 2'O-Methyl Cytosine
  modified_base (6)..(6): gm
  modified_base (7)..(7): 2'O-Methyl Adenosine
  modified_base (8)..(8): 2'O-Methyl Cytosine
  modified_base (9)..(10): gm
  modified_base (11)..(11): um
  modified_base (12)..(12): 2'O-Methyl Adenosine
  modified_base (13)..(13): gm
  modified_base (14)..(14): 2'O-Methyl Adenosine
  modified_base (15)..(16): um
  modified_base (17)..(17): 2'O-Methyl Adenosine
  modified_base (18)..(18): um
  modified_base (19)..(21): 2' Fluoro Guanosine
  modified_base (22)..(22): 2'O-Methyl Cytosine
  modified_base (23)..(23): 2'O-Methyl Adenosine
  modified_base (24)..(24): 2' Fluoro Guanosine
  modified_base (25)..(25): um
  modified_base (26)..(26): 2' Fluoro Guanosine
  modified_base (27)..(27): um
  modified_base (28)..(28): 2' Fluoro Guanosine
  modified_base (29)..(29): 2'O-Methyl Adenosine
  modified_base (30)..(31): 2'O-Methyl Cytosine
  modified_base (32)..(32): gm
  modified_base (33)..(33): 2'O-Methyl Cytosine
  modified_base (34)..(34): gm
  modified_base (35)..(36): 2'O-Methyl Cytosine
  modified_base (37)..(37): gm
  modified_base (38)..(38): 2'O-Methyl Cytosine
  modified_base (39)..(39): gm
  modified_base (40)..(41): 2'O-Methyl Cytosine
  modified_base (42)..(42): gm
  modified_base (43)..(43): 2'O-Methyl Adenosine
  modified_base (44)..(44): 2'O-Methyl Cytosine
  modified_base (45)..(45): um
  modified_base (46)..(47): 2'O-Methyl Cytosine
  modified_base (48)..(48): 2' Fluoro Guanosine
  modified_base (49)..(49): 2'O-Methyl Cytosine
  modified_base (50)..(50): 2' Fluoro Guanosine
  modified_base (51)..(51): 2'O-Methyl Cytosine
  modified_base (52)..(53): 2' Fluoro Guanosine
  modified_base (54)..(54): 2'O-Methyl Adenosine
  modified_base (55)..(56): 2' Fluoro Guanosine
  modified_base (57)..(57): 2'O-Methyl Cytosine
  modified_base (58)..(59): um
  modified_base (60)..(60): 2' Fluoro Guanosine
  modified_base (61)..(61): 2'O-Methyl Adenosine
  modified_base (62)..(63): 2' Fluoro Guanosine
  modified_base (64)..(64): um
  modified_base (65)..(65): 2'O-Methyl Adenosine
  modified_base (66)..(66): 2' Fluoro Guanosine
  modified_base (67)..(68): 2'O-Methyl Cytosine
  modified_base (69)..(69): 2' Fluoro Guanosine
  modified_base (69)..(69): gm
  modified_base (70)..(72): um
  modified_base (73)..(73): gm
  modified_base (74)..(74): um
  modified_base (75)..(75): 2'O-Methyl Cytosine
  modified_base (76)..(77): gm
  modified_base (78)..(78): inverted deoxythymidine incorporated at the 3'  end
  modified_base (78)..(78): 2'O-Methyl Cytosine

SEQ ID NO: 138 - RNA, 78 nt, Artificial Sequence; identical to SEQ ID NO: 136
  Aptamer
  modified_base (1)..(1): gm
  modified_base (2)..(2): 2'O-Methyl Cytosine
  modified_base (3)..(4): gm
  modified_base (5)..(5): 2'O-Methyl Cytosine
  modified_base (6)..(6): gm
  modified_base (7)..(7): 2'O-Methyl Adenosine
  modified_base (8)..(8): 2'O-Methyl Cytosine
  modified_base (9)..(10): gm
  modified_base (11)..(11): um
  modified_base (12)..(12): 2'O-Methyl Adenosine
  modified_base (13)..(13): gm
  modified_base (14)..(14): 2'O-Methyl Adenosine
  modified_base (15)..(16): um
  modified_base (17)..(17): 2'O-Methyl Adenosine
  modified_base (18)..(18): um
  modified_base (19)..(21): 2' Fluoro Guanosine
  modified_base (22)..(22): 2'O-Methyl Cytosine
  modified_base (23)..(23): 2'O-Methyl Adenosine
  modified_base (24)..(24): 2' Fluoro Guanosine
  modified_base (25)..(25): um
  modified_base (26)..(26): 2' Fluoro Guanosine
  modified_base (27)..(27): um
  modified_base (28)..(28): 2' Fluoro Guanosine
  modified_base (29)..(29): 2'O-Methyl Adenosine
  modified_base (30)..(31): 2'O-Methyl Cytosine
  modified_base (32)..(32): gm
  modified_base (33)..(33): 2'O-Methyl Cytosine
  modified_base (34)..(34): gm
  modified_base (35)..(36): 2'O-Methyl Cytosine
  modified_base (37)..(37): gm
  modified_base (38)..(38): 2'O-Methyl Cytosine
  modified_base (39)..(39): gm
  modified_base (40)..(41): 2'O-Methyl Cytosine
  modified_base (42)..(42): gm
  modified_base (43)..(43): 2'O-Methyl Adenosine
  modified_base (44)..(44): 2'O-Methyl Cytosine
  modified_base (45)..(45): um
  modified_base (46)..(47): 2'O-Methyl Cytosine
  modified_base (48)..(48): 2' Fluoro Guanosine
  modified_base (49)..(49): 2'O-Methyl Cytosine
  modified_base (50)..(50): 2' Fluoro Guanosine
  modified_base (51)..(51): 2'O-Methyl Cytosine
  modified_base (52)..(53): 2' Fluoro Guanosine
  modified_base (54)..(54): 2'O-Methyl Adenosine
  modified_base (55)..(56): 2' Fluoro Guanosine
  modified_base (57)..(57): 2'O-Methyl Cytosine
  modified_base (58)..(59): um
  modified_base (60)..(60): 2' Fluoro Guanosine
  modified_base (61)..(61): 2'O-Methyl Adenosine
  modified_base (62)..(63): 2' Fluoro Guanosine
  modified_base (64)..(64): um
  modified_base (65)..(65): 2'O-Methyl Adenosine
  modified_base (66)..(66): 2' Fluoro Guanosine
  modified_base (67)..(68): 2'O-Methyl Cytosine
  modified_base (69)..(69): 2' Fluoro Guanosine
  modified_base (69)..(69): gm
  modified_base (70)..(72): um
  modified_base (73)..(73): gm
  modified_base (74)..(74): um
  modified_base (75)..(75): 2'O-Methyl Cytosine
  modified_base (76)..(77): gm
  modified_base (78)..(78): inverted deoxythymidine incorporated at the 3'  end
  modified_base (78)..(78): 2'O-Methyl Cytosine

SEQ ID NO: 139 - RNA, 83 nt, Artificial Sequence
  Aptamer
  modified_base (1)..(1): gm
  modified_base (2)..(2): 2'O-Methyl Cytosine
  modified_base (3)..(4): gm
  modified_base (5)..(5): 2'O-Methyl Cytosine
  modified_base (6)..(6): gm
  modified_base (7)..(7): 2'O-Methyl Adenosine
  modified_base (8)..(8): 2'O-Methyl Cytosine
  modified_base (9)..(10): gm
  modified_base (11)..(11): um
  modified_base (12)..(12): 2'O-Methyl Adenosine
  modified_base (13)..(13): gm
  modified_base (14)..(14): 2'O-Methyl Adenosine
  modified_base (15)..(16): um
  modified_base (17)..(17): 2'O-Methyl Adenosine
  modified_base (18)..(18): um
  modified_base (19)..(21): 2' Fluoro Guanosine
  modified_base (22)..(22): 2'O-Methyl Cytosine
  modified_base (23)..(23): 2'O-Methyl Adenosine
  modified_base (24)..(24): 2' Fluoro Guanosine
  modified_base (25)..(25): um
  modified_base (26)..(26): 2' Fluoro Guanosine
  modified_base (27)..(27): um
  modified_base (28)..(28): 2' Fluoro Guanosine
  modified_base (29)..(29): 2'O-Methyl Adenosine
  modified_base (30)..(31): 2'O-Methyl Cytosine
  modified_base (32)..(32): gm
  modified_base (33)..(33): 2'O-Methyl Cytosine
  modified_base (34)..(34): gm
  modified_base (35)..(36): 2'O-Methyl Cytosine
  modified_base (37)..(37): gm
  modified_base (38)..(38): 2'O-Methyl Cytosine
  misc_feature (39)..(43): 2'O-Methyl deoxyuridine linker
  modified_base (39)..(43): 2'O-Methyl deoxyuridine
  modified_base (44)..(44): gm
  modified_base (45)..(46): 2'O-Methyl Cytosine
  modified_base (47)..(47): gm
  modified_base (48)..(48): 2'O-Methyl Adenosine
  modified_base (49)..(49): 2'O-Methyl Cytosine
  modified_base (50)..(50): um
  modified_base (51)..(52): 2'O-Methyl Cytosine
  modified_base (53)..(53): 2' Fluoro Guanosine
  modified_base (54)..(54): 2'O-Methyl Cytosine
  modified_base (55)..(55): 2' Fluoro Guanosine
  modified_base (56)..(56): 2'O-Methyl Cytosine
  modified_base (57)..(58): 2' Fluoro Guanosine
  modified_base (59)..(59): 2'O-Methyl Adenosine
  modified_base (60)..(61): 2' Fluoro Guanosine
  modified_base (62)..(62): 2'O-Methyl Cytosine
  modified_base (63)..(64): um
  modified_base (65)..(65): 2' Fluoro Guanosine
  modified_base (66)..(66): 2'O-Methyl Adenosine
  modified_base (67)..(68): 2' Fluoro Guanosine
  modified_base (69)..(69): um
  modified_base (70)..(70): 2'O-Methyl Adenosine
  modified_base (71)..(71): 2' Fluoro Guanosine
  modified_base (72)..(73): 2'O-Methyl Cytosine
  modified_base (74)..(74): 2' Fluoro Guanosine
  modified_base (75)..(77): um
  modified_base (78)..(78): gm
  modified_base (79)..(79): um
  modified_base (80)..(80): 2'O-Methyl Cytosine
  modified_base (81)..(82): gm
  modified_base (83)..(83): inverted deoxythymidine incorporated at the 3'  end
  modified_base (83)..(83): 2'O-Methyl Cytosine
gcggcgacgguagauuaugggcagugugaccgcgccgcuuuuugccgacuccgcgcggaggcuugagguagccguuugucggc

SEQ ID NO: 140 - RNA, 88 nt, Artificial Sequence
  Aptamer
  modified_base (1)..(1): gm
  modified_base (2)..(2): 2'O-Methyl Cytosine
  modified_base (3)..(4): gm
  modified_base (5)..(5): 2'O-Methyl Cytosine
  modified_base (6)..(6): gm
  modified_base (7)..(7): 2'O-Methyl Adenosine
  modified_base (8)..(8): 2'O-Methyl Cytosine
  modified_base (9)..(10): gm
  modified_base (11)..(11): um
  modified_base (12)..(12): 2'O-Methyl Adenosine
  modified_base (13)..(13): gm
  modified_base (14)..(14): 2'O-Methyl Adenosine
  modified_base (15)..(16): um
  modified_base (17)..(17): 2'O-Methyl Adenosine
  modified_base (18)..(18): um
  modified_base (19)..(21): 2' Fluoro Guanosine
  modified_base (22)..(22): 2'O-Methyl Cytosine
  modified_base (23)..(23): 2'O-Methyl Adenosine
  modified_base (24)..(24): 2' Fluoro Guanosine
  modified_base (25)..(25): um
  modified_base (26)..(26): 2' Fluoro Guanosine
  modified_base (27)..(27): um
  modified_base (28)..(28): 2' Fluoro Guanosine
  modified_base (29)..(29): 2'O-Methyl Adenosine
  modified_base (30)..(31): 2'O-Methyl Cytosine
  modified_base (32)..(32): gm
  modified_base (33)..(33): 2'O-Methyl Cytosine
  modified_base (34)..(34): gm
  modified_base (35)..(36): 2'O-Methyl Cytosine
  modified_base (37)..(37): gm
  modified_base (38)..(38): 2'O-Methyl Cytosine
  misc_feature (39)..(48): 2'O-Methyl deoxyuridine linker
  modified_base (39)..(48): 2'O-Methyl deoxyuridine
  modified_base (49)..(49): gm
  modified_base (50)..(51): 2'O-Methyl Cytosine
  modified_base (52)..(52): gm
  modified_base (53)..(53): 2'O-Methyl Adenosine
  modified_base (54)..(54): 2'O-Methyl Cytosine
  modified_base (55)..(55): um
  modified_base (56)..(57): 2'O-Methyl Cytosine
  modified_base (58)..(58): 2' Fluoro Guanosine
  modified_base (59)..(59): 2'O-Methyl Cytosine
  modified_base (60)..(60): 2' Fluoro Guanosine
  modified_base (61)..(61): 2'O-Methyl Cytosine
  modified_base (62)..(63): 2' Fluoro Guanosine
  modified_base (64)..(64): 2'O-Methyl Adenosine
  modified_base (65)..(66): 2' Fluoro Guanosine
  modified_base (67)..(67): 2'O-Methyl Cytosine
  modified_base (68)..(69): um
  modified_base (70)..(70): 2' Fluoro Guanosine
  modified_base (71)..(71): 2'O-Methyl Adenosine
  modified_base (72)..(73): 2' Fluoro Guanosine
  modified_base (74)..(74): um
  modified_base (75)..(75): 2'O-Methyl Adenosine
  modified_base (76)..(76): 2' Fluoro Guanosine
  modified_base (77)..(78): 2'O-Methyl Cytosine
  modified_base (79)..(79): 2' Fluoro Guanosine
  modified_base (80)..(82): um
  modified_base (83)..(83): gm
  modified_base (84)..(84): um
  modified_base (85)..(85): 2'O-Methyl Cytosine
  modified_base (87)..(87): gm
  modified_base (88)..(88): inverted deoxythymidine incorporated at the 3'  end
  modified_base (88)..(88): 2'O-Methyl Cytosine
gcggcgacgguagauuaugggcagugugaccgcgccgcuuuuuuuuuugccgacuccgcgcggaggcuugagguagccguuugucggc

SEQ ID NO: 141 - RNA, 31 nt, Artificial Sequence; identical to SEQ ID NO: 20
  Aptamer
  misc_feature (1)..(1): The 2'O-Methyl cytosine is attached  through the linker 1,3-propanediolspacer to 2'O-Methyl cytosine of another nucleotide sequence CXAC
  modified_base (1)..(2): 2'O-Methyl Cytosine
  modified_base (3)..(3): 2' Fluoro Guanosine
  modified_base (4)..(4): 2'O-Methyl Cytosine
  modified_base (5)..(5): 2' Fluoro Guanosine
  modified_base (6)..(6): 2'O-Methyl Cytosine
  modified_base (7)..(8): 2' Fluoro Guanosine
  modified_base (9)..(9): 2'O-Methyl Adenosine
  modified_base (10)..(11): 2' Fluoro Guanosine
  modified_base (12)..(12): 2'O-Methyl Cytosine
  modified_base (13)..(14): um
  modified_base (15)..(15): 2' Fluoro Guanosine
  modified_base (16)..(16): 2'O-Methyl Adenosine
  modified_base (17)..(18): 2' Fluoro Guanosine
  modified_base (19)..(19): um
  modified_base (20)..(20): 2'O-Methyl Adenosine
  modified_base (21)..(21): 2' Fluoro Guanosine
  modified_base (22)..(23): 2'O-Methyl Cytosine
  modified_base (24)..(24): 2' Fluoro Guanosine
  modified_base (25)..(27): um
  modified_base (28)..(28): 2' Fluoro Guanosine
  modified_base (29)..(29): um
  modified_base (30)..(30): 2'O-Methyl Cytosine
  modified_base (31)..(31): inverted deoxythymidine incorporated at the 3'  end
  modified_base (31)..(31): 2' Fluoro Guanosine

SEQ ID NO: 142 - RNA, 65 nt, Artificial Sequence
  Aptamer
  misc_feature (1)..(1): The 2'O-Methyl cytosine is attached  through the linker 1,3-propanediolspacer to 2'O-Methyl cytosine of another nucleotide sequence CXAC
  modified_base (1)..(2): 2'O-Methyl Cytosine
  modified_base (3)..(3): 2' Fluoro Guanosine
  modified_base (4)..(4): 2'O-Methyl Cytosine
  modified_base (5)..(5): 2' Fluoro Guanosine
  modified_base (6)..(6): 2'O-Methyl Cytosine
  modified_base (7)..(8): 2' Fluoro Guanosine
  modified_base (9)..(9): 2'O-Methyl Adenosine
  modified_base (10)..(11): 2' Fluoro Guanosine
  modified_base (12)..(12): 2'O-Methyl Cytosine
  modified_base (13)..(14): um
  modified_base (15)..(15): 2' Fluoro Guanosine
  modified_base (16)..(16): 2'O-Methyl Adenosine
  modified_base (17)..(18): 2' Fluoro Guanosine
  modified_base (19)..(19): um
  modified_base (20)..(20): 2'O-Methyl Adenosine
  modified_base (21)..(21): 2' Fluoro Guanosine
  modified_base (22)..(23): 2'O-Methyl Cytosine
  modified_base (24)..(24): 2' Fluoro Guanosine
  modified_base (25)..(27): um
  modified_base (28)..(28): gm
  modified_base (29)..(29): um
  modified_base (30)..(30): 2'O-Methyl Cytosine
  modified_base (31)..(33): gm
  modified_base (34)..(34): 2'O-Methyl Cytosine
  modified_base (35)..(35): gm
  modified_base (36)..(36): 2'O-Methyl Adenosine
  modified_base (37)..(37): 2'O-Methyl Cytosine
  modified_base (38)..(39): gm
  modified_base (40)..(40): um
  modified_base (41)..(41): 2'O-Methyl Adenosine
  modified_base (42)..(42): gm
  modified_base (43)..(43): 2'O-Methyl Adenosine
  modified_base (44)..(45): um
  modified_base (46)..(46): 2'O-Methyl Adenosine
  modified_base (47)..(47): um
  modified_base (48)..(50): gm
  modified_base (51)..(51): 2'O-Methyl Cytosine
  modified_base (52)..(52): 2'O-Methyl Adenosine
  modified_base (53)..(53): gm
  modified_base (54)..(54): um
  modified_base (55)..(55): gm
  modified_base (56)..(56): um
  modified_base (57)..(57): gm
  modified_base (58)..(58): 2'O-Methyl Adenosine
  modified_base (59)..(60): 2'O-Methyl Cytosine
  modified_base (61)..(61): gm
  modified_base (62)..(62): 2'O-Methyl Cytosine
  modified_base (63)..(63): gm
  modified_base (64)..(65): 2'O-Methyl Cytosine
  modified_base (65)..(65): inverted deoxythymidine incorporated at the 3'  end
ccgcgcggaggcuugagguagccguuugucgggcgacgguagauuaugggcagugugaccgcgcc

SEQ ID NO: 143 - RNA, 31 nt, Artificial Sequence; identical to SEQ ID NO: 20
  Aptamer
  misc_feature (1)..(1): The 2'O-Methyl cytosine is attached  through the linker 1,3-propanediolspacer to 2'O-Methyl cytosine of another nucleotide sequence CXAC
  modified_base (1)..(2): 2'O-Methyl Cytosine
  modified_base (3)..(3): 2' Fluoro Guanosine
  modified_base (4)..(4): 2'O-Methyl Cytosine
  modified_base (5)..(5): 2' Fluoro Guanosine
  modified_base (6)..(6): 2'O-Methyl Cytosine
  modified_base (7)..(8): 2' Fluoro Guanosine
  modified_base (9)..(9): 2'O-Methyl Adenosine
  modified_base (10)..(11): 2' Fluoro Guanosine
  modified_base (12)..(12): 2'O-Methyl Cytosine
  modified_base (13)..(14): um
  modified_base (15)..(15): 2' Fluoro Guanosine
  modified_base (16)..(16): 2'O-Methyl Adenosine
  modified_base (17)..(18): 2' Fluoro Guanosine
  modified_base (19)..(19): um
  modified_base (20)..(20): 2'O-Methyl Adenosine
  modified_base (21)..(21): 2' Fluoro Guanosine
  modified_base (22)..(23): 2'O-Methyl Cytosine
  modified_base (24)..(24): 2' Fluoro Guanosine
  modified_base (25)..(27): um
  modified_base (28)..(28): gm
  modified_base (29)..(29): um
  modified_base (30)..(30): 2'O-Methyl Cytosine
  misc_feature (31)..(31): The 2'O-Methyl guanosine is attached  through the linker 1,3-propanediolspacer to 2'O-Methyl guanosine of SEQ ID NO: 433
  modified_base (31)..(31): gm

SEQ ID NO: 144 - RNA, 31 nt, Artificial Sequence; identical to SEQ ID NO: 20
  Aptamer
  misc_feature (1)..(1): The 2'O-Methyl cytosine is attached  through the linker 1,3-propanediolspacer to 2'O-Methyl cytosine of another nucleotide sequence CXAC
  modified_base (1)..(2): 2'O-Methyl Cytosine
  modified_base (3)..(3): 2' Fluoro Guanosine
  modified_base (4)..(4): 2'O-Methyl Cytosine
  modified_base (5)..(5): 2' Fluoro Guanosine
  modified_base (6)..(6): 2'O-Methyl Cytosine
  modified_base (7)..(8): 2' Fluoro Guanosine
  modified_base (9)..(9): 2'O-Methyl Adenosine
  modified_base (10)..(11): 2' Fluoro Guanosine
  modified_base (12)..(12): 2'O-Methyl Cytosine
  modified_base (13)..(14): um
  modified_base (15)..(15): 2' Fluoro Guanosine
  modified_base (16)..(16): 2'O-Methyl Adenosine
  modified_base (17)..(18): 2' Fluoro Guanosine
  modified_base (19)..(19): um
  modified_base (20)..(20): 2'O-Methyl Adenosine
  modified_base (21)..(21): 2' Fluoro Guanosine
  modified_base (22)..(23): 2'O-Methyl Cytosine
  modified_base (24)..(24): 2' Fluoro Guanosine
  modified_base (25)..(27): um
  modified_base (28)..(28): gm
  modified_base (29)..(29): um
  modified_base (30)..(30): 2'O-Methyl Cytosine
  misc_feature (31)..(31): The 2'O-Methyl guanosine is attached through the linker hexaethylene glycol spacer to 2'O-Methyl guanosine of SEQ ID NO:434
  modified_base (31)..(31): gm

SEQ ID NO: 145 - RNA, 70 nt, Artificial Sequence
  Aptamer
  misc_feature (1)..(1): The 2'O-Methyl cytosine is attached  through the linker 1,3-propanediolspacer to 2'O-Methyl cytosine of another nucleotide sequence CXAC
  modified_base (1)..(2): 2'O-Methyl Cytosine
  modified_base (3)..(3): 2' Fluoro Guanosine
  modified_base (4)..(4): 2'O-Methyl Cytosine
  modified_base (5)..(5): 2' Fluoro Guanosine
  modified_base (6)..(6): 2'O-Methyl Cytosine
  modified_base (7)..(8): 2' Fluoro Guanosine
  modified_base (9)..(9): 2'O-Methyl Adenosine
  modified_base (10)..(11): 2' Fluoro Guanosine
  modified_base (12)..(12): 2'O-Methyl Cytosine
  modified_base (13)..(14): um
  modified_base (15)..(15): 2' Fluoro Guanosine
  modified_base (16)..(16): 2'O-Methyl Adenosine
  modified_base (17)..(18): 2' Fluoro Guanosine
  modified_base (19)..(19): um
  modified_base (20)..(20): 2'O-Methyl Adenosine
  modified_base (21)..(21): 2' Fluoro Guanosine
  modified_base (22)..(23): 2'O-Methyl Cytosine
  modified_base (24)..(24): 2' Fluoro Guanosine
  modified_base (25)..(27): um
  modified_base (28)..(28): gm
  modified_base (29)..(29): um
  modified_base (30)..(30): 2'O-Methyl Cytosine
  modified_base (31)..(31): gm
  misc_feature (32)..(36): 2'O-Methyl deoxyuridine linker
  modified_base (32)..(36): 2'O-Methyl deoxyuridine
  modified_base (37)..(38): gm
  modified_base (39)..(39): 2'O-Methyl Cytosine
  modified_base (40)..(40): gm
  modified_base (41)..(41): 2'O-Methyl Adenosine
  modified_base (42)..(42): 2'O-Methyl Cytosine
  modified_base (43)..(44): gm
  modified_base (45)..(45): um
  modified_base (46)..(46): 2'O-Methyl Adenosine
  modified_base (47)..(47): gm
  modified_base (48)..(48): 2'O-Methyl Adenosine
  modified_base (49)..(50): um
  modified_base (51)..(51): 2'O-Methyl Adenosine
  modified_base (52)..(52): um
  modified_base (53)..(55): 2' Fluoro Guanosine
  modified_base (56)..(56): 2'O-Methyl Cytosine
  modified_base (57)..(57): 2'O-Methyl Adenosine
  modified_base (58)..(58): 2' Fluoro Guanosine
  modified_base (59)..(59): um
  modified_base (60)..(60): 2' Fluoro Guanosine
  modified_base (61)..(61): um
  modified_base (62)..(62): 2' Fluoro Guanosine
  modified_base (63)..(63): 2'O-Methyl Adenosine
  modified_base (64)..(65): 2'O-Methyl Cytosine
  modified_base (66)..(66): gm
  modified_base (67)..(67): 2'O-Methyl Cytosine
  modified_base (68)..(68): gm
  modified_base (69)..(70): 2'O-Methyl Cytosine
  modified_base (70)..(70): inverted deoxythymidine incorporated at the 3'  end
ccgcgcggaggcuugagguagccguuugucguuuuuggcgacgguagauuaugggcagugugaccgcgcc

SEQ ID NO: 146 - RNA, 75 nt, Artificial Sequence
  Aptamer
  misc_feature (1)..(1): The 2'O-Methyl cytosine is attached  through the linker 1,3-propanediolspacer to 2'O-Methyl cytosine of another nucleotide sequence CXAC
  modified_base (1)..(2): 2'O-Methyl Cytosine
  modified_base (3)..(3): 2' Fluoro Guanosine
  modified_base (4)..(4): 2'O-Methyl Cytosine
  modified_base (5)..(5): 2' Fluoro Guanosine
  modified_base (6)..(6): 2'O-Methyl Cytosine
  modified_base (7)..(8): 2' Fluoro Guanosine
  modified_base (9)..(9): 2'O-Methyl Adenosine
  modified_base (10)..(11): 2' Fluoro Guanosine
  modified_base (12)..(12): 2'O-Methyl Cytosine
  modified_base (13)..(14): um
  modified_base (15)..(15): 2' Fluoro Guanosine
  modified_base (16)..(16): 2'O-Methyl Adenosine
  modified_base (17)..(18): 2' Fluoro Guanosine
  modified_base (19)..(19): um
  modified_base (20)..(20): 2'O-Methyl Adenosine
  modified_base (21)..(21): 2' Fluoro Guanosine
  modified_base (22)..(23): 2'O-Methyl Cytosine
  modified_base (24)..(24): 2' Fluoro Guanosine
  modified_base (25)..(27): um
  modified_base (28)..(28): gm
  modified_base (29)..(29): um
  modified_base (30)..(30): 2'O-Methyl Cytosine
  modified_base (31)..(31): gm
  misc_feature (32)..(41): 2'O-Methyl deoxyuridine linker
  modified_base (32)..(41): 2'O-Methyl deoxyuridine
  modified_base (42)..(43): gm
  modified_base (44)..(44): 2'O-Methyl Cytosine
  modified_base (45)..(45): gm
  modified_base (46)..(46): 2'O-Methyl Adenosine
  modified_base (47)..(47): 2'O-Methyl Cytosine
  modified_base (48)..(49): gm
  modified_base (50)..(50): um
  modified_base (51)..(51): 2'O-Methyl Adenosine
  modified_base (52)..(52): gm
  modified_base (53)..(53): 2'O-Methyl Adenosine
  modified_base (54)..(55): um
  modified_base (56)..(56): 2'O-Methyl Adenosine
  modified_base (57)..(57): um
  modified_base (58)..(60): 2' Fluoro Guanosine
  modified_base (61)..(61): 2'O-Methyl Cytosine
  modified_base (62)..(62): 2'O-Methyl Adenosine
  modified_base (63)..(63): 2' Fluoro Guanosine
  modified_base (64)..(64): um
  modified_base (65)..(65): 2' Fluoro Guanosine
  modified_base (66)..(66): um
  modified_base (67)..(67): 2' Fluoro Guanosine
  modified_base (68)..(68): 2'O-Methyl Adenosine
  modified_base (69)..(70): 2'O-Methyl Cytosine
  modified_base (71)..(71): gm
  modified_base (72)..(72): 2'O-Methyl Cytosine
  modified_base (73)..(73): gm
  modified_base (74)..(75): 2'O-Methyl Cytosine
  modified_base (75)..(75): inverted deoxythymidine incorporated at the 3'  end
ccgcgcggaggcuugagguagccguuugucguuuuuuuuuuggcgacgguagauuaugggcagugugaccgcgcc

SEQ ID NO: 147 - RNA, 38 nt, Artificial Sequence; identical to SEQ ID NO: 62
  Aptamer
  modified_base (1)..(2): gm
  modified_base (3)..(3): 2'O-Methyl Cytosine
  modified_base (4)..(4): gm
  modified_base (5)..(5): 2'O-Methyl Adenosine
  modified_base (6)..(6): 2'O-Methyl Cytosine
  modified_base (7)..(8): gm
  modified_base (10)..(10): 2'O-Methyl Adenosine
  modified_base (11)..(11): gm
  modified_base (12)..(12): 2'O-Methyl Adenosine
  modified_base (15)..(15): 2'O-Methyl Adenosine
  modified_base (17)..(19): 2' Fluoro Guanosine
  modified_base (20)..(20): 2'O-Methyl Cytosine
  modified_base (21)..(21): 2'O-Methyl Adenosine
  modified_base (22)..(22): 2' Fluoro Guanosine
  modified_base (24)..(24): 2' Fluoro Guanosine
  modified_base (26)..(26): 2' Fluoro Guanosine
  modified_base (27)..(27): 2'O-Methyl Adenosine
  modified_base (28)..(29): 2'O-Methyl Cytosine
  modified_base (30)..(30): gm
  modified_base (31)..(31): 2'O-Methyl Cytosine
  modified_base (32)..(32): gm
  modified_base (33)..(35): 2'O-Methyl Cytosine
  modified_base (36)..(36): gm
  modified_base (37)..(37): 2'O-Methyl Adenosine
  misc_feature (38)..(38): The 2'O-Methyl cytosine is attached  through the linker 1,3-propanediolspacer to 2'O-Methyl cytosine of SEQ ID NO: 435
  modified_base (38)..(38): 2'O-Methyl Cytosine

SEQ ID NO: 148 - RNA, 34 nt, Artificial Sequence; identical to SEQ ID NO: 48
  Aptamer
  modified_base (1)..(2): gm
  modified_base (3)..(3): 2'O-Methyl Cytosine
  modified_base (4)..(4): gm
  modified_base (5)..(5): 2'O-Methyl Adenosine
  modified_base (6)..(6): 2'O-Methyl Cytosine
  modified_base (7)..(8): gm
  modified_base (9)..(9): um
  modified_base (10)..(10): 2'O-Methyl Adenosine
  modified_base (11)..(11): gm
  modified_base (12)..(12): 2'O-Methyl Adenosine
  modified_base (13)..(14): um
  modified_base (15)..(15): 2'O-Methyl Adenosine
  modified_base (16)..(16): um
  modified_base (17)..(19): 2' Fluoro Guanosine
  modified_base (20)..(20): 2'O-Methyl Cytosine
  modified_base (21)..(21): 2'O-Methyl Adenosine
  modified_base (22)..(22): 2' Fluoro Guanosine
  modified_base (23)..(23): um
  modified_base (24)..(24): 2' Fluoro Guanosine
  modified_base (25)..(25): um
  modified_base (26)..(26): 2' Fluoro Guanosine
  modified_base (27)..(27): 2'O-Methyl Adenosine
  modified_base (28)..(29): 2'O-Methyl Cytosine
  modified_base (30)..(30): gm
  modified_base (31)..(31): 2'O-Methyl Cytosine
  modified_base (32)..(32): gm
  modified_base (33)..(34): 2'O-Methyl Cytosine
  misc_feature (34)..(34): The 2'O-Methyl cytosine is attached  through the linker 1,3-propanediolspacer to 2'O-Methyl cytosine of another nucleotide sequence CXAC

SEQ ID NO: 149 - RNA, 34 nt, Artificial Sequence; identical to SEQ ID NO: 48
  Aptamer 269
  modified_base (1)..(2): gm
  modified_base (3)..(3): 2'O-Methyl Cytosine
  modified_base (4)..(4): gm
  modified_base (5)..(5): 2'O-Methyl Adenosine
  modified_base (6)..(6): 2'O-Methyl Cytosine
  modified_base (7)..(8): gm
  modified_base (9)..(9): um
  modified_base (10)..(10): 2'O-Methyl Adenosine
  modified_base (11)..(11): gm
  modified_base (12)..(12): 2'O-Methyl Adenosine
  modified_base (13)..(14): um
  modified_base (15)..(15): 2'O-Methyl Adenosine
  modified_base (16)..(16): um
  modified_base (17)..(19): 2' Fluoro Guanosine
  modified_base (20)..(20): 2'O-Methyl Cytosine
  modified_base (21)..(21): 2'O-Methyl Adenosine
  modified_base (22)..(22): 2' Fluoro Guanosine
  modified_base (23)..(23): um
  modified_base (24)..(24): 2' Fluoro Guanosine
  modified_base (25)..(25): um
  modified_base (26)..(26): 2' Fluoro Guanosine
  modified_base (27)..(27): 2'O-Methyl Adenosine
  modified_base (28)..(29): 2'O-Methyl Cytosine
  modified_base (30)..(30): gm
  modified_base (31)..(31): 2'O-Methyl Cytosine
  modified_base (32)..(32): gm
  modified_base (33)..(34): 2'O-Methyl Cytosine

SEQ ID NO: 150 - RNA, 43 nt, Artificial Sequence; identical to SEQ ID NO: 65
  Aptamer  269
  modified_base (1)..(2): gm
  modified_base (3)..(3): 2'O-Methyl Cytosine
  modified_base (4)..(4): gm
  modified_base (5)..(5): 2'O-Methyl Adenosine
  modified_base (6)..(6): 2'O-Methyl Cytosine
  modified_base (7)..(8): gm
  modified_base (9)..(9): um
  modified_base (10)..(10): 2'O-Methyl Adenosine
  modified_base (11)..(11): gm
  modified_base (12)..(12): 2'O-Methyl Adenosine
  modified_base (13)..(14): um
  modified_base (15)..(15): 2'O-Methyl Adenosine
  modified_base (16)..(16): um
  modified_base (17)..(19): 2' Fluoro Guanosine
  modified_base (20)..(20): 2'O-Methyl Cytosine
  modified_base (21)..(21): 2'O-Methyl Adenosine
  modified_base (22)..(22): 2' Fluoro Guanosine
  modified_base (23)..(23): um
  modified_base (24)..(24): 2' Fluoro Guanosine
  modified_base (25)..(25): um
  modified_base (26)..(26): 2' Fluoro Guanosine
  modified_base (27)..(27): 2'O-Methyl Adenosine
  modified_base (28)..(29): 2'O-Methyl Cytosine
  modified_base (30)..(30): gm
  modified_base (31)..(31): 2'O-Methyl Cytosine
  modified_base (32)..(32): gm
  modified_base (33)..(34): 2'O-Methyl Cytosine
  modified_base (35)..(39): 2'O-Methyl deoxyuridine
  misc_feature (35)..(39): 2'O-Methyl deoxyuridine linker
  modified_base (40)..(40): 2'O-Methyl Cytosine
  modified_base (41)..(41): gm
  modified_base (42)..(42): 2'O-Methyl Adenosine
  modified_base (43)..(43): 2'O-Methyl Cytosine
  misc_feature (43)..(43): The 2'O-Methyl cytosine is attached  through the linker 1,3-propanediolspacer to 2'O-Methyl cytosine of SEQ ID NO: 438

SEQ ID NO: 151 - RNA, 48 nt, Artificial Sequence; identical to SEQ ID NO: 66
  Aptamer 269
  modified_base (1)..(2): gm
  modified_base (3)..(3): gm
  modified_base (3)..(3): 2'O-Methyl Cytosine
  modified_base (5)..(5): 2'O-Methyl Adenosine
  modified_base (6)..(6): 2'O-Methyl Cytosine
  modified_base (7)..(8): gm
  modified_base (9)..(9): um
  modified_base (10)..(10): 2'O-Methyl Adenosine
  modified_base (11)..(11): gm
  modified_base (12)..(12): 2'O-Methyl Adenosine
  modified_base (13)..(14): um
  modified_base (15)..(15): 2'O-Methyl Adenosine
  modified_base (16)..(16): um
  modified_base (17)..(19): 2' Fluoro Guanosine
  modified_base (20)..(20): 2'O-Methyl Cytosine
  modified_base (21)..(21): 2'O-Methyl Adenosine
  modified_base (22)..(22): 2' Fluoro Guanosine
  modified_base (23)..(23): um
  modified_base (24)..(24): 2' Fluoro Guanosine
  modified_base (25)..(25): um
  modified_base (26)..(26): 2' Fluoro Guanosine
  modified_base (27)..(27): 2'O-Methyl Adenosine
  modified_base (28)..(29): 2'O-Methyl Cytosine
  modified_base (30)..(30): gm
  modified_base (31)..(31): 2'O-Methyl Cytosine
  modified_base (32)..(32): gm
  modified_base (33)..(34): 2'O-Methyl Cytosine
  modified_base (35)..(44): 2'O-Methyl deoxyuridine
  misc_feature (35)..(44): 2'O-Methyl deoxyuridine linker
  modified_base (45)..(45): 2'O-Methyl Cytosine
  modified_base (46)..(46): gm
  modified_base (47)..(47): 2'O-Methyl Adenosine
  modified_base (48)..(48): 2'O-Methyl Cytosine
  misc_feature (48)..(48): The 2'O-Methyl cytosine is attached  through the linker 1,3-propanediolspacer to 2'O-Methyl cytosine of SEQ ID NO: 442

SEQ ID NO: 152 - RNA, 33 nt, Artificial Sequence
  Aptamer 628
  modified_base (1)..(2): 2'O-Methyl Cytosine
  misc_feature (1)..(1): The 2'O-Methyl cytosine is attached  through the linker 1,3-propanediolspacer to 2'O-Methyl cytosine of another nucleotide sequence XCCXAC
  modified_base (3)..(3): 2' Fluoro Guanosine
  modified_base (4)..(4): 2'O-Methyl Cytosine
  modified_base (5)..(5): 2' Fluoro Guanosine
  modified_base (6)..(6): 2'O-Methyl Cytosine
  modified_base (7)..(8): 2' Fluoro Guanosine
  modified_base (9)..(9): 2'O-Methyl Adenosine
  modified_base (10)..(11): 2' Fluoro Guanosine
  modified_base (12)..(12): 2'O-Methyl Cytosine
  modified_base (13)..(14): um
  modified_base (15)..(15): 2' Fluoro Guanosine
  modified_base (16)..(16): 2'O-Methyl Adenosine
  modified_base (17)..(18): 2' Fluoro Guanosine
  modified_base (19)..(19): um
  modified_base (20)..(20): 2'O-Methyl Adenosine
  modified_base (21)..(21): 2' Fluoro Guanosine
  modified_base (22)..(23): 2'O-Methyl Cytosine
  modified_base (25)..(27): um
  modified_base (28)..(28): gm
  modified_base (29)..(29): um
  modified_base (30)..(30): 2'O-Methyl Cytosine
  modified_base (31)..(32): gm
  modified_base (33)..(33): 2'O-Methyl Cytosine
ccgcgcggaggcuugagguagccguuugucggc

SEQ ID NO: 153 - RNA, 31 nt, Artificial Sequence; identical to SEQ ID NO: 20
  Aptamer 628
  modified_base (1)..(2): 2'O-Methyl Cytosine
  misc_feature (1)..(1): The 2'O-Methyl cytosine is attached  through the linker 1,3-propanediolspacer to 2'O-Methyl cytosine of another nucleotide sequence CXAC
  modified_base (3)..(3): 2' Fluoro Guanosine
  modified_base (4)..(4): 2'O-Methyl Cytosine
  modified_base (5)..(5): 2' Fluoro Guanosine
  modified_base (6)..(6): 2'O-Methyl Cytosine
  modified_base (7)..(8): 2' Fluoro Guanosine
  modified_base (9)..(9): 2'O-Methyl Adenosine
  modified_base (10)..(11): 2' Fluoro Guanosine
  modified_base (12)..(12): 2'O-Methyl Cytosine
  modified_base (13)..(14): um
  modified_base (15)..(15): 2' Fluoro Guanosine
  modified_base (16)..(16): 2'O-Methyl Adenosine
  modified_base (17)..(18): 2' Fluoro Guanosine
  modified_base (19)..(19): um
  modified_base (20)..(20): 2'O-Methyl Adenosine
  modified_base (21)..(21): 2' Fluoro Guanosine
  modified_base (22)..(23): 2'O-Methyl Cytosine
  modified_base (24)..(24): 2' Fluoro Guanosine
  modified_base (25)..(27): um
  modified_base (28)..(28): gm
  modified_base (29)..(29): um
  modified_base (30)..(30): 2'O-Methyl Cytosine
  modified_base (31)..(31): gm
  misc_feature (31)..(31): The 2'O-Methyl guanosine is attached  through the linker 1,3-propanediolspacer to 2'O-Methyl guanosine of SEQ ID NO: 303

SEQ ID NO: 154 - RNA, 31 nt, Artificial Sequence; identical to SEQ ID NO: 20
  Aptamer 628
  misc_feature (1)..(1): The 2'O-Methyl cytosine is attached  through the linker 1,3-propanediolspacer to 2'O-Methyl cytosine of another nucleotide sequence CXAC
  modified_base (3)..(3): 2' Fluoro Guanosine
  modified_base (5)..(5): 2' Fluoro Guanosine
  modified_base (7)..(8): 2' Fluoro Guanosine
  modified_base (9)..(9): 2'O-Methyl Adenosine
  modified_base (9)..(9): 2'O-Methyl Cytosinee
  modified_base (10)..(11): 2' Fluoro Guanosine
  modified_base (13)..(14): um
  modified_base (15)..(15): 2' Fluoro Guanosine
  modified_base (16)..(16): 2'O-Methyl Adenosine
  modified_base (16)..(16): 2'O-Methyl Cytosinee
  modified_base (17)..(18): 2' Fluoro Guanosine
  modified_base (19)..(19): um
  modified_base (20)..(20): 2'O-Methyl Adenosine
  modified_base (20)..(20): 2'O-Methyl Cytosinee
  modified_base (21)..(21): 2' Fluoro Guanosine
  modified_base (24)..(24): 2' Fluoro Guanosine
  modified_base (25)..(27): um
  modified_base (28)..(28): gm
  modified_base (29)..(29): um
  misc_feature (31)..(31): The 2'O-Methyl guanosine is attached through the linker hexaethylene glycol spacer to 2'O-Methyl guanosine of SEQ ID NO:304
  modified_base (31)..(31): gm

SEQ ID NO: 155 - RNA, 74 nt, Artificial Sequence
  Aptamer
  modified_base (1)..(2): 2'O-Methyl Cytosine
  misc_feature (1)..(1): The 2'O-Methyl cytosine is attached  through the linker 1,3-propanediolspacer to 2'O-Methyl cytosine of another nucleotide sequence CXAC
  modified_base (3)..(3): 2' Fluoro Guanosine
  modified_base (4)..(4): 2'O-Methyl Cytosine
  modified_base (5)..(5): 2' Fluoro Guanosine
  modified_base (6)..(6): 2'O-Methyl Cytosine
  modified_base (7)..(8): 2' Fluoro Guanosine
  modified_base (9)..(9): 2'O-Methyl Adenosine
  modified_base (10)..(11): 2' Fluoro Guanosine
  modified_base (12)..(12): 2'O-Methyl Cytosine
  modified_base (13)..(14): um
  modified_base (15)..(15): 2' Fluoro Guanosine
  modified_base (16)..(16): 2'O-Methyl Adenosine
  modified_base (17)..(18): 2' Fluoro Guanosine
  modified_base (19)..(19): um
  modified_base (20)..(20): 2'O-Methyl Adenosine
  modified_base (21)..(21): 2' Fluoro Guanosine
  modified_base (22)..(23): 2'O-Methyl Cytosine
  modified_base (24)..(24): 2' Fluoro Guanosine
  modified_base (25)..(27): um
  modified_base (28)..(28): gm
  modified_base (29)..(29): um
  modified_base (30)..(30): 2'O-Methyl Cytosine
  modified_base (31)..(31): gm
  modified_base (32)..(36): 2'O-Methyl deoxyuridine
  misc_feature (32)..(36): 2'O-Methyl deoxyuridine linker
  modified_base (37)..(37): gm
  modified_base (38)..(38): 2'O-Methyl Cytosine
  modified_base (39)..(40): gm
  modified_base (41)..(41): 2'O-Methyl Cytosine
  modified_base (42)..(42): gm
  modified_base (43)..(43): 2'O-Methyl Adenosine
  modified_base (44)..(44): 2'O-Methyl Cytosine
  modified_base (45)..(46): gm
  modified_base (47)..(47): um
  modified_base (48)..(48): 2'O-Methyl Adenosine
  modified_base (49)..(49): gm
  modified_base (50)..(50): 2'O-Methyl Adenosine
  modified_base (51)..(52): um
  modified_base (53)..(53): 2'O-Methyl Adenosine
  modified_base (54)..(54): um
  modified_base (55)..(57): 2' Fluoro Guanosine
  modified_base (58)..(58): 2'O-Methyl Cytosine
  modified_base (59)..(59): 2'O-Methyl Adenosine
  modified_base (60)..(60): 2' Fluoro Guanosine
  modified_base (61)..(61): um
  modified_base (62)..(62): 2' Fluoro Guanosine
  modified_base (63)..(63): um
  modified_base (64)..(64): 2' Fluoro Guanosine
  modified_base (65)..(65): 2'O-Methyl Adenosine
  modified_base (66)..(67): 2'O-Methyl Cytosine
  modified_base (68)..(68): gm
  modified_base (69)..(69): 2'O-Methyl Cytosine
  modified_base (70)..(70): gm
  modified_base (71)..(72): 2'O-Methyl Cytosine
  modified_base (73)..(73): gm
  modified_base (74)..(74): 2'O-Methyl Cytosine
ccgcgcggaggcuugagguagccguuugucguuuuugcggcgacgguagauuaugggcagugugaccgcgccgc

SEQ ID NO: 156 - RNA, 79 nt, Artificial Sequence
  Aptamer
  modified_base (1)..(2): 2'O-Methyl Cytosine
  misc_feature (1)..(1): The 2'O-Methyl cytosine is attached  through the linker 1,3-propanediolspacer to 2'O-Methyl cytosine of another nucleotide sequence CXAC
  modified_base (3)..(3): 2' Fluoro Guanosine
  modified_base (4)..(4): 2'O-Methyl Cytosine
  modified_base (5)..(5): 2' Fluoro Guanosine
  modified_base (6)..(6): 2'O-Methyl Cytosine
  modified_base (7)..(8): 2' Fluoro Guanosine
  modified_base (9)..(9): 2'O-Methyl Adenosine
  modified_base (10)..(11): 2' Fluoro Guanosine
  modified_base (12)..(12): 2'O-Methyl Cytosine
  modified_base (13)..(14): um
  modified_base (15)..(15): 2' Fluoro Guanosine
  modified_base (16)..(16): 2'O-Methyl Adenosine
  modified_base (17)..(18): 2' Fluoro Guanosine
  modified_base (19)..(19): um
  modified_base (20)..(20): 2'O-Methyl Adenosine
  modified_base (21)..(21): 2' Fluoro Guanosine
  modified_base (22)..(23): 2'O-Methyl Cytosine
  modified_base (24)..(24): 2' Fluoro Guanosine
  modified_base (25)..(27): um
  modified_base (28)..(28): gm
  modified_base (29)..(29): um
  modified_base (30)..(30): 2'O-Methyl Cytosine
  modified_base (31)..(31): gm
  modified_base (32)..(41): 2'O-Methyl deoxyuridine
  misc_feature (32)..(41): 2'O-Methyl deoxyuridine linker
  modified_base (42)..(42): gm
  modified_base (43)..(43): 2'O-Methyl Cytosine
  modified_base (44)..(45): gm
  modified_base (46)..(46): 2'O-Methyl Cytosine
  modified_base (47)..(47): gm
  modified_base (48)..(48): 2'O-Methyl Adenosine
  modified_base (49)..(49): 2'O-Methyl Cytosine
  modified_base (50)..(51): gm
  modified_base (52)..(52): um
  modified_base (53)..(53): 2'O-Methyl Adenosine
  modified_base (54)..(54): gm
  modified_base (55)..(55): 2'O-Methyl Adenosine
  modified_base (56)..(57): um
  modified_base (58)..(58): 2'O-Methyl Adenosine
  modified_base (59)..(59): um
  modified_base (60)..(62): 2' Fluoro Guanosine
  modified_base (63)..(63): 2'O-Methyl Cytosine
  modified_base (64)..(64): 2'O-Methyl Adenosine
  modified_base (65)..(65): 2' Fluoro Guanosine
  modified_base (66)..(66): um
  modified_base (67)..(67): 2' Fluoro Guanosine
  modified_base (68)..(68): um
  modified_base (69)..(69): 2' Fluoro Guanosine
  modified_base (70)..(70): 2'O-Methyl Adenosine
  modified_base (71)..(72): 2'O-Methyl Cytosine
  modified_base (73)..(73): gm
  modified_base (74)..(74): 2'O-Methyl Cytosine
  modified_base (75)..(75): gm
  modified_base (76)..(77): 2'O-Methyl Cytosine
  modified_base (78)..(78): gm
  modified_base (79)..(79): 2'O-Methyl Cytosine
ccgcgcggaggcuugagguagccguuugucguuuuuuuuuugcggcgacgguagauuaugggcagugugaccgcgccgc

SEQ ID NO: 157 - RNA, 38 nt, Artificial Sequence; identical to SEQ ID NO: 62
  aptamer
  modified_base (1)..(2): gm
  modified_base (3)..(3): 2'O-Methyl Cytosine
  modified_base (4)..(4): gm
  modified_base (5)..(5): 2'O-Methyl Adenosine
  modified_base (6)..(6): 2'O-Methyl Cytosine
  modified_base (7)..(8): gm
  modified_base (9)..(9): um
  modified_base (10)..(10): 2'O-Methyl Adenosine
  modified_base (11)..(11): gm
  modified_base (12)..(12): 2'O-Methyl Adenosine
  modified_base (13)..(14): um
  modified_base (15)..(15): 2'O-Methyl Adenosine
  modified_base (16)..(16): um
  modified_base (17)..(19): 2' Fluoro Guanosine
  modified_base (20)..(20): 2'O-Methyl Cytosine
  modified_base (21)..(21): 2'O-Methyl Adenosine
  modified_base (22)..(22): 2' Fluoro Guanosine
  modified_base (23)..(23): um
  modified_base (24)..(24): 2' Fluoro Guanosine
  modified_base (25)..(25): um
  modified_base (26)..(26): 2' Fluoro Guanosine
  modified_base (27)..(27): 2'O-Methyl Adenosine
  modified_base (28)..(29): 2'O-Methyl Cytosine
  modified_base (30)..(30): gm
  modified_base (31)..(31): 2'O-Methyl Cytosine
  modified_base (32)..(32): gm
  modified_base (33)..(34): 2'O-Methyl Cytosine
  modified_base (35)..(35): 2'O-Methyl Cytosine
  modified_base (36)..(36): gm
  modified_base (37)..(37): 2'O-Methyl Adenosine
  misc_feature (38)..(38): The 2'O-Methyl cytosine is attached  through the linker 1,3-propanediolspacer to 2'O-Methyl cytosine of SEQ ID NO: 305
  misc_feature (38)..(38): The 2'O-Methyl cytosine is attached  through the linker 1,3-propanediolspacer to 2'O-Methyl cytosine of SEQ ID NO: 305
  modified_base (38)..(38): 2'O-Methyl Cytosine
  misc_feature (38)..(38): The 2'O-Methyl cytosine is attached  through the linker 1,3-propanediolspacer to 2'O-Methyl cytosine of SEQ ID NO: 305

SEQ ID NO: 158 - RNA, 38 nt, Artificial Sequence; identical to SEQ ID NO: 78
  Aptamer
  modified_base (1)..(1): gm
  modified_base (2)..(2): 2'O-Methyl Cytosine
  modified_base (3)..(4): gm
  modified_base (5)..(5): 2'O-Methyl Cytosine
  modified_base (6)..(6): gm
  modified_base (7)..(7): 2'O-Methyl Adenosine
  modified_base (8)..(8): 2'O-Methyl Cytosine
  modified_base (9)..(10): gm
  modified_base (11)..(11): um
  modified_base (12)..(12): 2'O-Methyl Adenosine
  modified_base (13)..(13): gm
  modified_base (15)..(15): 2'O-Methyl Adenosine
  modified_base (15)..(16): um
  modified_base (18)..(18): um
  modified_base (19)..(21): 2' Fluoro Guanosine
  modified_base (21)..(21): 2'O-Methyl Adenosine
  modified_base (22)..(22): 2'O-Methyl Cytosine
  modified_base (24)..(24): 2' Fluoro Guanosine
  modified_base (25)..(25): um
  modified_base (26)..(26): 2' Fluoro Guanosine
  modified_base (27)..(27): 2'O-Methyl Adenosine
  modified_base (27)..(27): um
  modified_base (28)..(28): 2' Fluoro Guanosine
  modified_base (30)..(31): 2'O-Methyl Cytosine
  modified_base (32)..(32): gm
  modified_base (33)..(33): 2'O-Methyl Cytosine
  modified_base (34)..(34): gm
  modified_base (35)..(36): 2'O-Methyl Cytosine
  modified_base (37)..(37): gm
  modified_base (38)..(38): 2'O-Methyl Cytosine
  misc_feature (38)..(38): The 2'O-Methyl cytosine is attached  through the linker 1,3-propanediolspacer to 2'O-Methyl cytosine of another nucleotide sequence CXAC

SEQ ID NO: 159 - RNA, 38 nt, Artificial Sequence; identical to SEQ ID NO: 78
  aptamer
  modified_base (2)..(2): 2'O-Methyl Cytosine
  modified_base (5)..(5): 2'O-Methyl Cytosine
  modified_base (7)..(7): 2'O-Methyl Adenosine
  modified_base (8)..(8): 2'O-Methyl Cytosine
  modified_base (11)..(11): um
  modified_base (12)..(12): 2'O-Methyl Adenosine
  modified_base (14)..(14): 2'O-Methyl Adenosine
  modified_base (15)..(16): um
  modified_base (17)..(17): 2'O-Methyl Adenosine
  modified_base (18)..(18): um
  modified_base (19)..(21): 2' Fluoro Guanosine
  modified_base (19)..(21): gm
  modified_base (22)..(22): 2'O-Methyl Cytosine
  modified_base (23)..(23): 2'O-Methyl Adenosine
  modified_base (24)..(24): 2' Fluoro Guanosine
  modified_base (24)..(24): gm
  modified_base (25)..(25): um
  modified_base (26)..(26): 2' Fluoro Guanosine
  modified_base (26)..(26): gm
  modified_base (27)..(27): um
  modified_base (28)..(28): 2' Fluoro Guanosine
  modified_base (28)..(28): gm
  modified_base (29)..(29): 2'O-Methyl Adenosine
  modified_base (29)..(29): 2'O-Methyl Adenosine
  modified_base (30)..(31): 2'O-Methyl Cytosine
  modified_base (33)..(33): 2'O-Methyl Cytosine
  modified_base (35)..(36): 2'O-Methyl Cytosine
  modified_base (38)..(38): 2'O-Methyl Cytosine
  misc_feature (38)..(38): The 2'O-Methyl cytosine is attached  through the linker Hexaethyleneglycol spacer to 2'O-Methyl cytosine of another nucleotide sequence CXAC

SEQ ID NO: 160 - RNA, 47 nt, Artificial Sequence
  aptamer
  modified_base (1)..(2): gm
  modified_base (3)..(3): 2'O-Methyl Cytosine
  modified_base (4)..(4): gm
  modified_base (5)..(5): 2'O-Methyl Cytosine
  modified_base (6)..(6): gm
  modified_base (7)..(7): 2'O-Methyl Adenosine
  modified_base (8)..(8): 2'O-Methyl Cytosine
  modified_base (9)..(10): gm
  modified_base (11)..(11): um
  modified_base (12)..(12): 2'O-Methyl Adenosine
  modified_base (13)..(13): gm
  modified_base (14)..(14): 2'O-Methyl Adenosine
  modified_base (15)..(16): um
  modified_base (17)..(17): 2'O-Methyl Adenosine
  modified_base (18)..(18): um
  modified_base (19)..(21): 2' Fluoro Guanosine
  modified_base (22)..(22): 2'O-Methyl Cytosine
  modified_base (23)..(23): 2'O-Methyl Adenosine
  modified_base (24)..(24): 2' Fluoro Guanosine
  modified_base (25)..(25): um
  modified_base (26)..(26): 2' Fluoro Guanosine
  modified_base (27)..(27): um
  modified_base (28)..(28): 2' Fluoro Guanosine
  modified_base (29)..(29): 2'O-Methyl Adenosine
  modified_base (30)..(31): 2'O-Methyl Cytosine
  modified_base (32)..(32): gm
  modified_base (33)..(33): 2'O-Methyl Cytosine
  modified_base (34)..(34): gm
  modified_base (35)..(36): 2'O-Methyl Cytosine
  modified_base (37)..(37): gm
  modified_base (38)..(38): 2'O-Methyl Cytosine
  modified_base (39)..(43): 2'O-Methyl deoxyuridine
  misc_feature (39)..(43): 2'O-Methyl deoxyuridine linker
  modified_base (44)..(44): 2'O-Methyl Cytosine
  modified_base (45)..(45): gm
  modified_base (46)..(46): 2'O-Methyl Adenosine
  modified_base (47)..(47): 2'O-Methyl Cytosine
  misc_feature (47)..(47): The 2'O-Methyl cytosine is attached  through the linker 1,3-propanediolspacer to 2'O-Methyl cytosine of SEQ ID NO: 308
ggcgcgacgguagauuaugggcagugugaccgcgccgcuuuuucgac

SEQ ID NO: 161 - RNA, 52 nt, Artificial Sequence; identical to SEQ ID NO: 88
  aptamer
  modified_base (1)..(1): gm
  modified_base (2)..(2): 2'O-Methyl Cytosine
  modified_base (3)..(4): gm
  modified_base (5)..(5): 2'O-Methyl Cytosine
  modified_base (6)..(6): gm
  modified_base (7)..(7): 2'O-Methyl Adenosine
  modified_base (8)..(8): 2'O-Methyl Cytosine
  modified_base (9)..(10): gm
  modified_base (11)..(11): um
  modified_base (12)..(12): 2'O-Methyl Adenosine
  modified_base (13)..(13): gm
  modified_base (14)..(14): 2'O-Methyl Adenosine
  modified_base (15)..(16): um
  modified_base (17)..(17): 2'O-Methyl Adenosine
  modified_base (18)..(18): um
  modified_base (19)..(21): 2' Fluoro Guanosine
  modified_base (22)..(22): 2'O-Methyl Cytosine
  modified_base (23)..(23): 2'O-Methyl Adenosine
  modified_base (24)..(24): 2' Fluoro Guanosine
  modified_base (25)..(25): um
  modified_base (26)..(26): 2' Fluoro Guanosine
  modified_base (27)..(27): um
  modified_base (28)..(28): 2' Fluoro Guanosine
  modified_base (29)..(29): 2'O-Methyl Adenosine
  modified_base (30)..(31): 2'O-Methyl Cytosine
  modified_base (32)..(32): gm
  modified_base (33)..(33): 2'O-Methyl Cytosine
  modified_base (34)..(34): gm
  modified_base (35)..(36): 2'O-Methyl Cytosine
  modified_base (37)..(37): gm
  modified_base (38)..(38): 2'O-Methyl Cytosine
  modified_base (39)..(48): 2'O-Methyl deoxyuridine
  misc_feature (39)..(48): 2'O-Methyl deoxyuridine linker
  modified_base (49)..(49): 2'O-Methyl Cytosine
  modified_base (50)..(50): gm
  modified_base (51)..(51): 2'O-Methyl Adenosine
  modified_base (52)..(52): 2'O-Methyl Cytosine
  misc_feature (52)..(52): The 2'O-Methyl cytosine is attached  through the linker 1,3-propanediolspacer to 2'O-Methyl cytosine of SEQ ID NO: 309

SEQ ID NO: 162 - RNA, 71 nt, Artificial Sequence
  aptamer
  modified_base (1)..(2): 2'O-Methyl Cytosine
  misc_feature (1)..(1): The 2'O-Methyl cytosine is attached  through the linker 1,3-propanediol to 2'O-Methyl cytosine of another nucleotide sequence XCCXAC
  modified_base (3)..(3): 2' Fluoro Guanosine
  modified_base (4)..(4): 2'O-Methyl Cytosine
  modified_base (5)..(5): 2' Fluoro Guanosine
  modified_base (6)..(6): 2'O-Methyl Cytosine
  modified_base (7)..(8): 2' Fluoro Guanosine
  modified_base (9)..(9): 2'O-Methyl Adenosine
  modified_base (10)..(11): 2' Fluoro Guanosine
  modified_base (12)..(12): 2'O-Methyl Cytosine
  modified_base (13)..(14): um
  modified_base (15)..(15): 2' Fluoro Guanosine
  modified_base (16)..(16): 2'O-Methyl Adenosine
  modified_base (17)..(18): 2' Fluoro Guanosine
  modified_base (19)..(19): um
  modified_base (20)..(20): 2'O-Methyl Adenosine
  modified_base (21)..(21): 2' Fluoro Guanosine
  modified_base (22)..(23): 2'O-Methyl Cytosine
  modified_base (24)..(24): 2' Fluoro Guanosine
  modified_base (25)..(27): um
  modified_base (28)..(28): gm
  modified_base (29)..(29): um
  modified_base (30)..(30): 2'O-Methyl Cytosine
  modified_base (31)..(32): gm
  modified_base (33)..(33): 2'O-Methyl Cytosine
  modified_base (34)..(34): gm
  modified_base (35)..(35): 2'O-Methyl Cytosine
  modified_base (36)..(37): gm
  modified_base (38)..(38): 2'O-Methyl Cytosine
  modified_base (39)..(39): gm
  modified_base (40)..(40): 2'O-Methyl Adenosine
  modified_base (41)..(41): 2'O-Methyl Cytosine
  modified_base (42)..(43): gm
  modified_base (44)..(44): um
  modified_base (45)..(45): 2'O-Methyl Adenosine
  modified_base (46)..(46): gm
  modified_base (47)..(47): 2'O-Methyl Adenosine
  modified_base (48)..(49): um
  modified_base (50)..(50): 2'O-Methyl Adenosine
  modified_base (51)..(51): um
  modified_base (52)..(54): 2' Fluoro Guanosine
  modified_base (55)..(55): 2'O-Methyl Cytosine
  modified_base (56)..(56): 2'O-Methyl Adenosine
  modified_base (57)..(57): 2' Fluoro Guanosine
  modified_base (58)..(58): um
  modified_base (59)..(59): 2' Fluoro Guanosine
  modified_base (60)..(60): um
  modified_base (61)..(61): 2' Fluoro Guanosine
  modified_base (62)..(62): 2'O-Methyl Adenosine
  modified_base (63)..(64): 2'O-Methyl Cytosine
  modified_base (65)..(65): gm
  modified_base (66)..(66): 2'O-Methyl Cytosine
  modified_base (67)..(67): gm
  modified_base (68)..(69): 2'O-Methyl Cytosine
  modified_base (70)..(70): gm
  modified_base (71)..(71): 2'O-Methyl Cytosine
ccgcgcggaggcuugagguagccguuugucggcgcggcgacgguagauuaugggcagugugaccgcgccgc

SEQ ID NO: 163 - RNA, 33 nt, Artificial Sequence; identical to SEQ ID NO: 152
  Aptamer
  modified_base (1)..(2): 2'O-Methyl Cytosine
  misc_feature (1)..(1): The 2'O-Methyl cytosine is attached  through the linker 1,3-propanediolspacer to 2'O-Methyl cytosine of another nucleotide sequence XCCXAC
  modified_base (3)..(3): 2' Fluoro Guanosine
  modified_base (4)..(4): 2'O-Methyl Cytosine
  modified_base (5)..(5): 2' Fluoro Guanosine
  modified_base (6)..(6): 2'O-Methyl Cytosine
  modified_base (7)..(8): 2' Fluoro Guanosine
  modified_base (9)..(9): 2'O-Methyl Adenosine
  modified_base (10)..(11): 2' Fluoro Guanosine
  modified_base (12)..(12): 2'O-Methyl Cytosine
  modified_base (13)..(14): um
  modified_base (15)..(15): 2' Fluoro Guanosine
  modified_base (16)..(16): 2'O-Methyl Adenosine
  modified_base (17)..(18): 2' Fluoro Guanosine
  modified_base (19)..(19): um
  modified_base (20)..(20): 2'O-Methyl Adenosine
  modified_base (21)..(21): 2' Fluoro Guanosine
  modified_base (22)..(23): 2'O-Methyl Cytosine
  modified_base (24)..(24): 2' Fluoro Guanosine
  modified_base (25)..(27): um
  modified_base (28)..(28): gm
  modified_base (29)..(29): um
  modified_base (30)..(30): 2'O-Methyl Cytosine
  modified_base (31)..(31): gm
  modified_base (32)..(32): gm
  modified_base (33)..(33): 2'O-Methyl Cytosine
  misc_feature (33)..(33): The 2'O-Methyl cytosine is attached  through the linker 1,3-propanediolspacer to 2'O-Methyl guanosine of SEQ ID NO: 310

SEQ ID NO: 164 - RNA, 33 nt, Artificial Sequence; identical to SEQ ID NO: 152
  Aptamer
  modified_base (1)..(2): 2'O-Methyl Cytosine
  misc_feature (1)..(1): The 2'O-Methyl cytosine is attached  through the linker 1,3-propanediolspacer to 2'O-Methyl cytosine of another nucleotide sequence XCCXAC
  modified_base (3)..(3): 2' Fluoro Guanosine
  modified_base (4)..(4): 2'O-Methyl Cytosine
  modified_base (5)..(5): 2' Fluoro Guanosine
  modified_base (6)..(6): 2'O-Methyl Cytosine
  modified_base (7)..(8): 2' Fluoro Guanosine
  modified_base (9)..(9): 2'O-Methyl Adenosine
  modified_base (10)..(11): 2' Fluoro Guanosine
  modified_base (12)..(12): 2'O-Methyl Cytosine
  modified_base (13)..(14): um
  modified_base (15)..(15): 2' Fluoro Guanosine
  modified_base (16)..(16): 2'O-Methyl Adenosine
  modified_base (17)..(18): 2' Fluoro Guanosine
  modified_base (19)..(19): um
  modified_base (21)..(21): 2' Fluoro Guanosine
  modified_base (22)..(23): 2'O-Methyl Cytosine
  modified_base (24)..(24): 2' Fluoro Guanosine
  modified_base (25)..(25): 2'O-Methyl Adenosine
  modified_base (25)..(27): um
  modified_base (28)..(28): gm
  modified_base (29)..(29): um
  modified_base (30)..(30): 2'O-Methyl Cytosine
  modified_base (31)..(31): gm
  modified_base (32)..(32): gm
  modified_base (33)..(33): 2'O-Methyl Cytosine
  misc_feature (33)..(33): The 2'O-Methyl cytosine is attached through the linker hexaethylene glycol spacer to 2'O-Methyl guanosine of SEQ ID NO:311

SEQ ID NO: 165 - RNA, 38 nt, Artificial Sequence
  Aptamer
  modified_base (1)..(2): 2'O-Methyl Cytosine
  misc_feature (1)..(1): The 2'O-Methyl cytosine is attached  through the linker 1,3-propanediolspacer to 2'O-Methyl cytosine of another nucleotide sequence XCCXAC
  modified_base (3)..(3): 2' Fluoro Guanosine
  modified_base (4)..(4): 2'O-Methyl Cytosine
  modified_base (5)..(5): 2' Fluoro Guanosine
  modified_base (6)..(6): 2'O-Methyl Cytosine
  modified_base (7)..(8): 2' Fluoro Guanosine
  modified_base (9)..(9): 2'O-Methyl Adenosine
  modified_base (10)..(11): 2' Fluoro Guanosine
  modified_base (12)..(12): 2'O-Methyl Cytosine
  modified_base (13)..(14): um
  modified_base (15)..(15): 2' Fluoro Guanosine
  modified_base (16)..(16): 2'O-Methyl Adenosine
  modified_base (17)..(18): 2' Fluoro Guanosine
  modified_base (19)..(19): um
  modified_base (20)..(20): 2'O-Methyl Adenosine
  modified_base (21)..(21): 2' Fluoro Guanosine
  modified_base (22)..(23): 2'O-Methyl Cytosine
  modified_base (24)..(24): 2' Fluoro Guanosine
  modified_base (25)..(27): um
  modified_base (28)..(28): gm
  modified_base (29)..(29): um
  modified_base (30)..(30): 2'O-Methyl Cytosine
  modified_base (31)..(31): gm
  modified_base (32)..(32): gm
  modified_base (33)..(33): 2'O-Methyl Cytosine
  modified_base (34)..(38): 2'O-Methyl deoxyuridine
  misc_feature (34)..(38): 2'O-Methyl deoxyuridine linker is attached to 2'O-Methyl guanosine of SEQ ID NO:312
ccgcgcggaggcuugagguagccguuugucggcuuuuu

SEQ ID NO: 166 - RNA, 81 nt, Artificial Sequence
  Aptamer
  modified_base (1)..(2): 2'O-Methyl Cytosine
  misc_feature (1)..(1): The 2'O-Methyl cytosine is attached  through the linker 1,3-propanediolspacer to 2'O-Methyl cytosine of another nucleotide sequence XCCXAC
  modified_base (3)..(3): 2' Fluoro Guanosine
  modified_base (4)..(4): 2'O-Methyl Cytosine
  modified_base (5)..(5): 2' Fluoro Guanosine
  modified_base (6)..(6): 2'O-Methyl Cytosine
  modified_base (7)..(8): 2' Fluoro Guanosine
  modified_base (9)..(9): 2'O-Methyl Adenosine
  modified_base (10)..(11): 2' Fluoro Guanosine
  modified_base (12)..(12): 2'O-Methyl Cytosine
  modified_base (13)..(14): um
  modified_base (15)..(15): 2' Fluoro Guanosine
  modified_base (16)..(16): 2'O-Methyl Adenosine
  modified_base (17)..(18): 2' Fluoro Guanosine
  modified_base (19)..(19): um
  modified_base (20)..(20): 2'O-Methyl Adenosine
  modified_base (21)..(21): 2' Fluoro Guanosine
  modified_base (22)..(23): 2'O-Methyl Cytosine
  modified_base (24)..(24): 2' Fluoro Guanosine
  modified_base (25)..(27): um
  modified_base (28)..(28): gm
  modified_base (29)..(29): um
  modified_base (30)..(30): 2'O-Methyl Cytosine
  modified_base (31)..(31): gm
  modified_base (32)..(32): gm
  modified_base (33)..(33): 2'O-Methyl Cytosine
  modified_base (34)..(43): 2'O-Methyl deoxyuridine
  misc_feature (34)..(43): 2'O-Methyl deoxyuridine linker
  modified_base (44)..(44): gm
  modified_base (45)..(45): 2'O-Methyl Cytosine
  modified_base (46)..(47): gm
  modified_base (48)..(48): 2'O-Methyl Cytosine
  modified_base (49)..(49): gm
  modified_base (50)..(50): 2'O-Methyl Adenosine
  modified_base (51)..(51): 2'O-Methyl Cytosine
  modified_base (52)..(53): gm
  modified_base (54)..(54): um
  modified_base (55)..(55): 2'O-Methyl Adenosine
  modified_base (56)..(56): gm
  modified_base (57)..(57): 2'O-Methyl Adenosine
  modified_base (58)..(59): um
  modified_base (60)..(60): 2'O-Methyl Adenosine
  modified_base (61)..(61): um
  modified_base (62)..(64): 2' Fluoro Guanosine
  modified_base (65)..(65): 2'O-Methyl Cytosine
  modified_base (66)..(66): 2'O-Methyl Adenosine
  modified_base (67)..(67): 2' Fluoro Guanosine
  modified_base (68)..(68): um
  modified_base (69)..(69): 2' Fluoro Guanosine
  modified_base (70)..(70): um
  modified_base (71)..(71): 2' Fluoro Guanosine
  modified_base (72)..(72): 2'O-Methyl Adenosine
  modified_base (73)..(74): 2'O-Methyl Cytosine
  modified_base (75)..(75): gm
  modified_base (76)..(76): 2'O-Methyl Cytosine
  modified_base (77)..(77): gm
  modified_base (78)..(79): 2'O-Methyl Cytosine
  modified_base (80)..(80): gm
  modified_base (81)..(81): 2'O-Methyl Cytosine
ccgcgcggaggcuugagguagccguuugucggcuuuuuuuuuugcggcgacgguagauuaugggcagugugaccgcgccgc

SEQ ID NO: 167 - RNA, 44 nt, Artificial Sequence; identical to SEQ ID NO: 94
  Aptamer
  modified_base (1)..(1): gm
  modified_base (2)..(2): 2'O-Methyl Cytosine
  modified_base (3)..(4): gm
  modified_base (5)..(5): 2'O-Methyl Cytosine
  modified_base (6)..(6): gm
  modified_base (7)..(7): 2'O-Methyl Adenosine
  modified_base (8)..(8): 2'O-Methyl Cytosine
  modified_base (9)..(10): gm
  modified_base (11)..(11): um
  modified_base (12)..(12): 2'O-Methyl Adenosine
  modified_base (13)..(13): gm
  modified_base (14)..(14): 2'O-Methyl Adenosine
  modified_base (15)..(16): um
  modified_base (17)..(17): 2'O-Methyl Adenosine
  modified_base (18)..(18): um
  modified_base (19)..(21): 2' Fluoro Guanosine
  modified_base (22)..(22): 2'O-Methyl Cytosine
  modified_base (23)..(23): 2'O-Methyl Adenosine
  modified_base (24)..(24): 2' Fluoro Guanosine
  modified_base (25)..(25): um
  modified_base (26)..(26): 2' Fluoro Guanosine
  modified_base (27)..(27): um
  modified_base (28)..(28): 2' Fluoro Guanosine
  modified_base (29)..(29): 2'O-Methyl Adenosine
  modified_base (30)..(31): 2'O-Methyl Cytosine
  modified_base (32)..(32): gm
  modified_base (33)..(33): 2'O-Methyl Cytosine
  modified_base (34)..(34): gm
  modified_base (35)..(36): 2'O-Methyl Cytosine
  modified_base (37)..(37): gm
  modified_base (38)..(38): 2'O-Methyl Cytosine
  modified_base (39)..(39): gm
  modified_base (40)..(41): 2'O-Methyl Cytosine
  modified_base (42)..(42): gm
  modified_base (43)..(43): 2'O-Methyl Adenosine
  modified_base (44)..(44): 2'O-Methyl Cytosine
  misc_feature (44)..(44): The 2'O-Methyl cytosine is attached  through the linker 1,3-propanediolspacer to 2'O-Methyl cytosine of SEQ ID NO: 313

SEQ ID NO: 168 - RNA, 44 nt, Artificial Sequence; identical to SEQ ID NO: 94
  Aptamer
  modified_base (1)..(1): gm
  modified_base (2)..(2): 2'O-Methyl Cytosine
  modified_base (3)..(4): gm
  modified_base (5)..(5): 2'O-Methyl Cytosine
  modified_base (6)..(6): gm
  modified_base (7)..(7): 2'O-Methyl Adenosine
  modified_base (8)..(8): 2'O-Methyl Cytosine
  modified_base (9)..(10): gm
  modified_base (11)..(11): um
  modified_base (12)..(12): 2'O-Methyl Adenosine
  modified_base (13)..(13): gm
  modified_base (14)..(14): 2'O-Methyl Adenosine
  modified_base (15)..(16): um
  modified_base (17)..(17): 2'O-Methyl Adenosine
  modified_base (18)..(18): um
  modified_base (19)..(21): 2' Fluoro Guanosine
  modified_base (22)..(22): 2'O-Methyl Cytosine
  modified_base (23)..(23): 2'O-Methyl Adenosine
  modified_base (24)..(24): 2' Fluoro Guanosine
  modified_base (25)..(25): um
  modified_base (26)..(26): 2' Fluoro Guanosine
  modified_base (27)..(27): um
  modified_base (28)..(28): 2' Fluoro Guanosine
  modified_base (29)..(29): 2'O-Methyl Adenosine
  modified_base (30)..(31): 2'O-Methyl Cytosine
  modified_base (32)..(32): gm
  modified_base (33)..(33): 2'O-Methyl Cytosine
  modified_base (34)..(34): gm
  modified_base (35)..(36): 2'O-Methyl Cytosine
  modified_base (37)..(37): gm
  modified_base (38)..(38): 2'O-Methyl Cytosine
  modified_base (39)..(39): gm
  modified_base (40)..(41): 2'O-Methyl Cytosine
  modified_base (42)..(42): gm
  modified_base (43)..(43): 2'O-Methyl Adenosine
  modified_base (44)..(44): 2'O-Methyl Cytosine
  misc_feature (44)..(44): The 2'O-Methyl cytosine is attached  through the linker 1,3-propanediolspacer to 2'O-Methyl cytosine of SEQ ID NO: 314

SEQ ID NO: 169 - RNA, 44 nt, Artificial Sequence; identical to SEQ ID NO: 94
  Aptamer
  modified_base (1)..(1): gm
  modified_base (2)..(2): 2'O-Methyl Cytosine
  modified_base (3)..(4): gm
  modified_base (5)..(5): 2'O-Methyl Cytosine
  modified_base (6)..(6): gm
  modified_base (7)..(7): 2'O-Methyl Adenosine
  modified_base (8)..(8): 2'O-Methyl Cytosine
  modified_base (9)..(10): gm
  modified_base (11)..(11): um
  modified_base (12)..(12): 2'O-Methyl Adenosine
  modified_base (13)..(13): gm
  modified_base (14)..(14): 2'O-Methyl Adenosine
  modified_base (15)..(16): um
  modified_base (17)..(17): 2'O-Methyl Adenosine
  modified_base (18)..(18): um
  modified_base (19)..(21): 2' Fluoro Guanosine
  modified_base (22)..(22): 2'O-Methyl Cytosine
  modified_base (23)..(23): 2'O-Methyl Adenosine
  modified_base (24)..(24): 2' Fluoro Guanosine
  modified_base (25)..(25): um
  modified_base (26)..(26): 2' Fluoro Guanosine
  modified_base (27)..(27): um
  modified_base (28)..(28): 2' Fluoro Guanosine
  modified_base (30)..(31): 2'O-Methyl Cytosine
  modified_base (32)..(32): gm
  modified_base (33)..(33): 2'O-Methyl Cytosine
  modified_base (34)..(34): gm
  modified_base (35)..(36): 2'O-Methyl Cytosine
  modified_base (37)..(37): gm
  modified_base (38)..(38): 2'O-Methyl Cytosine
  modified_base (39)..(39): gm
  modified_base (40)..(41): 2'O-Methyl Cytosine
  modified_base (42)..(42): gm
  modified_base (43)..(43): 2'O-Methyl Adenosine
  modified_base (44)..(44): 2'O-Methyl Cytosine
  misc_feature (44)..(44): The 2'O-Methyl cytosine is attached  through the linker 1,3-propanediolspacer to 2'O-Methyl cytosine of SEQ ID NO: 315

SEQ ID NO: 170 - RNA, 49 nt, Artificial Sequence; identical to SEQ ID NO: 97
  aptamer
  modified_base (1)..(1): gm
  modified_base (2)..(2): 2'O-Methyl Cytosine
  modified_base (3)..(4): gm
  modified_base (5)..(5): 2'O-Methyl Cytosine
  modified_base (6)..(6): gm
  modified_base (7)..(7): 2'O-Methyl Adenosine
  modified_base (8)..(8): 2'O-Methyl Cytosine
  modified_base (9)..(10): gm
  modified_base (11)..(11): um
  modified_base (12)..(12): 2'O-Methyl Adenosine
  modified_base (13)..(13): gm
  modified_base (14)..(14): 2'O-Methyl Adenosine
  modified_base (15)..(16): um
  modified_base (17)..(17): 2'O-Methyl Adenosine
  modified_base (18)..(18): um
  modified_base (19)..(21): 2' Fluoro Guanosine
  modified_base (22)..(22): 2'O-Methyl Cytosine
  modified_base (23)..(23): 2'O-Methyl Adenosine
  modified_base (24)..(24): 2' Fluoro Guanosine
  modified_base (25)..(25): um
  modified_base (26)..(26): 2' Fluoro Guanosine
  modified_base (27)..(27): um
  modified_base (28)..(28): 2' Fluoro Guanosine
  modified_base (29)..(29): 2'O-Methyl Adenosine
  modified_base (30)..(31): 2'O-Methyl Cytosine
  modified_base (32)..(32): gm
  modified_base (33)..(33): 2'O-Methyl Cytosine
  modified_base (34)..(34): gm
  modified_base (35)..(36): 2'O-Methyl Cytosine
  modified_base (37)..(37): gm
  modified_base (38)..(38): 2'O-Methyl Cytosine
  modified_base (39)..(43): 2'O-Methyl deoxyuridine
  misc_feature (39)..(43): 2'O-Methyl deoxyuridine linker
  modified_base (44)..(44): gm
  modified_base (45)..(46): 2'O-Methyl Cytosine
  modified_base (47)..(47): gm
  modified_base (48)..(48): 2'O-Methyl Adenosine
  modified_base (49)..(49): 2'O-Methyl Cytosine
  misc_feature (49)..(49): The 2'O-Methyl cytosine is attached  through the linker 1,3-propanediolspacer to 2'O-Methyl cytosine of SEQ ID NO: 316

SEQ ID NO: 171 - RNA, 54 nt, Artificial Sequence; identical to SEQ ID NO: 98
  aptamer
  modified_base (2)..(2): 2'O-Methyl Cytosine
  modified_base (3)..(4): gm
  modified_base (5)..(5): 2'O-Methyl Cytosine
  modified_base (6)..(6): gm
  modified_base (7)..(7): 2'O-Methyl Adenosine
  modified_base (8)..(8): 2'O-Methyl Cytosine
  modified_base (9)..(10): gm
  modified_base (11)..(11): um
  modified_base (12)..(12): 2'O-Methyl Adenosine
  modified_base (13)..(13): gm
  modified_base (14)..(14): 2'O-Methyl Adenosine
  modified_base (15)..(16): um
  modified_base (17)..(17): 2'O-Methyl Adenosine
  modified_base (18)..(18): um
  modified_base (19)..(21): 2' Fluoro Guanosine
  modified_base (22)..(22): 2'O-Methyl Cytosine
  modified_base (23)..(23): 2'O-Methyl Adenosine
  modified_base (24)..(24): 2' Fluoro Guanosine
  modified_base (25)..(25): um
  modified_base (26)..(26): 2' Fluoro Guanosine
  modified_base (27)..(27): um
  modified_base (28)..(28): 2' Fluoro Guanosine
  modified_base (29)..(29): 2'O-Methyl Adenosine
  modified_base (30)..(31): 2'O-Methyl Cytosine
  modified_base (32)..(32): gm
  modified_base (33)..(33): 2'O-Methyl Cytosine
  modified_base (34)..(34): gm
  modified_base (35)..(36): 2'O-Methyl Cytosine
  modified_base (37)..(37): gm
  modified_base (38)..(38): 2'O-Methyl Cytosine
  modified_base (39)..(48): 2'O-Methyl deoxyuridine
  misc_feature (39)..(48): 2'O-Methyl deoxyuridine linker
  modified_base (49)..(49): gm
  modified_base (50)..(51): 2'O-Methyl Cytosine
  modified_base (52)..(52): gm
  modified_base (53)..(53): 2'O-Methyl Adenosine
  modified_base (54)..(54): 2'O-Methyl Cytosine
  misc_feature (54)..(54): The 2'O-Methyl cytosine is attached  through the linker 1,3-propanediolspacer to 2'O-Methyl cytosine of SEQ ID NO: 317

SEQ ID NO: 172 - RNA, 29 nt, Artificial Sequence
  Aptamer
  modified_base (1)..(1): gm
  modified_base (2)..(2): 2'O-Methyl Cytosine
  modified_base (3)..(4): gm
  modified_base (5)..(5): um
  modified_base (6)..(8): 2' Fluoro Guanosine
  modified_base (9)..(11): 2'O-Methyl Adenosine
  modified_base (12)..(12): um
  modified_base (13)..(13): 2' Fluoro Guanosine
  modified_base (14)..(14): um
  modified_base (15)..(15): 2' Fluoro Guanosine
  modified_base (16)..(16): 2'O-Methyl Adenosine
  modified_base (17)..(17): 2' Fluoro Guanosine
  modified_base (18)..(18): 2'O-Methyl Adenosine
  modified_base (19)..(19): um
  modified_base (20)..(22): 2' Fluoro Guanosine
  modified_base (23)..(24): um
  modified_base (25)..(25): gm
  modified_base (26)..(27): 2'O-Methyl Cytosine
  modified_base (28)..(28): gm
  modified_base (29)..(29): 2'O-Methyl Cytosine
gcggugggaaaugugagauggguugccgc

SEQ ID NO: 173 - RNA, 62 nt, Artificial Sequence
  aptamer
  modified_base (1)..(2): 2'O-Methyl Cytosine
  misc_feature (1)..(1): The 2'O-Methyl cytosine is attached  through the linker 1,3-propanediolspacer to 2'O-Methyl cytosine of another nucleotide sequence CXAC
  modified_base (3)..(3): 2' Fluoro Guanosine
  modified_base (4)..(4): 2'O-Methyl Cytosine
  modified_base (5)..(5): 2' Fluoro Guanosine
  modified_base (6)..(6): 2'O-Methyl Cytosine
  modified_base (7)..(8): 2' Fluoro Guanosine
  modified_base (9)..(9): 2'O-Methyl Adenosine
  modified_base (10)..(12): 2' Fluoro Guanosine
  modified_base (13)..(13): gm
  modified_base (14)..(16): um
  modified_base (17)..(17): 2'O-Methyl Cytosine
  modified_base (18)..(18): 2'O-Methyl Adenosine
  modified_base (19)..(19): um
  modified_base (20)..(21): 2'O-Methyl Adenosine
  modified_base (22)..(22): um
  modified_base (23)..(25): 2'O-Methyl Cytosine
  modified_base (26)..(26): 2' Fluoro Guanosine
  modified_base (27)..(29): um
  modified_base (30)..(30): gm
  modified_base (31)..(31): um
  modified_base (32)..(32): 2'O-Methyl Cytosine
  modified_base (33)..(34): gm
  modified_base (35)..(35): 2'O-Methyl Cytosine
  modified_base (36)..(37): gm
  modified_base (38)..(38): um
  modified_base (39)..(41): 2' Fluoro Guanosine
  modified_base (42)..(44): 2'O-Methyl Adenosine
  modified_base (45)..(45): um
  modified_base (46)..(46): 2' Fluoro Guanosine
  modified_base (47)..(47): um
  modified_base (48)..(48): 2' Fluoro Guanosine
  modified_base (49)..(49): 2'O-Methyl Adenosine
  modified_base (50)..(50): 2' Fluoro Guanosine
  modified_base (51)..(51): 2'O-Methyl Adenosine
  modified_base (52)..(52): um
  modified_base (53)..(55): 2' Fluoro Guanosine
  modified_base (56)..(57): um
  modified_base (58)..(58): gm
  modified_base (59)..(60): 2'O-Methyl Cytosine
  modified_base (61)..(61): gm
  modified_base (62)..(62): 2'O-Methyl Cytosine
ccgcgcggagggguuucauaaucccguuugucggcggugggaaaugugagauggguugccgc

SEQ ID NO: 174 - RNA, 33 nt, Artificial Sequence; identical to SEQ ID NO: 1
  Aptamer
  modified_base (1)..(2): 2'O-Methyl Cytosine
  misc_feature (1)..(1): The 2'O-Methyl cytosine is attached  through the linker 1,3-propanediolspacer to 2'O-Methyl cytosine of another nucleotide sequence CXAC
  misc_feature (1)..(1): The 2'O-Methyl cytosine is attached  through the linker 1,3-propanediolspacer to 2'O-Methyl cytosine of another nucleotide sequence CXAC
  modified_base (3)..(3): 2' Fluoro Guanosine
  modified_base (4)..(4): 2'O-Methyl Cytosine
  modified_base (5)..(5): 2' Fluoro Guanosine
  modified_base (6)..(6): 2'O-Methyl Cytosine
  modified_base (7)..(8): 2' Fluoro Guanosine
  modified_base (9)..(9): 2'O-Methyl Adenosine
  modified_base (10)..(12): 2' Fluoro Guanosine
  modified_base (13)..(13): gm
  modified_base (14)..(16): um
  modified_base (17)..(17): 2'O-Methyl Cytosine
  modified_base (18)..(18): 2'O-Methyl Adenosine
  modified_base (19)..(19): um
  modified_base (20)..(21): 2'O-Methyl Adenosine
  modified_base (22)..(22): um
  modified_base (23)..(25): 2'O-Methyl Cytosine
  modified_base (26)..(26): 2' Fluoro Guanosine
  modified_base (27)..(29): um
  modified_base (30)..(30): gm
  modified_base (31)..(31): um
  modified_base (32)..(32): 2'O-Methyl Cytosine
  modified_base (33)..(33): gm
  misc_feature (33)..(33): The 2'O-Methyl guanosine is attached  through the linker 1,3-propanediolspacer to 2'O-Methyl guanosine of SEQ ID NO: 318

SEQ ID NO: 175 - RNA, 33 nt, Artificial Sequence; identical to SEQ ID NO: 1
  aptamer
  misc_feature (1)..(1): The 2'O-Methyl cytosine is attached  through the linker 1,3-propanediolspacer to 2'O-Methyl cytosine of another nucleotide sequence CXAC
  modified_base (1)..(2): 2'O-Methyl Cytosine
  modified_base (3)..(3): 2' Fluoro Guanosine
  modified_base (4)..(4): 2'O-Methyl Cytosine
  modified_base (5)..(5): 2' Fluoro Guanosine
  modified_base (6)..(6): 2'O-Methyl Cytosine
  modified_base (7)..(8): 2' Fluoro Guanosine
  modified_base (9)..(9): 2'O-Methyl Adenosine
  modified_base (10)..(12): 2' Fluoro Guanosine
  modified_base (13)..(13): gm
  modified_base (14)..(16): um
  modified_base (17)..(17): 2'O-Methyl Cytosine
  modified_base (18)..(18): 2'O-Methyl Adenosine
  modified_base (19)..(19): um
  modified_base (20)..(21): 2'O-Methyl Adenosine
  modified_base (22)..(22): um
  modified_base (23)..(25): 2'O-Methyl Cytosine
  modified_base (26)..(26): 2' Fluoro Guanosine
  modified_base (27)..(29): um
  modified_base (30)..(30): gm
  modified_base (31)..(31): um
  modified_base (32)..(32): 2'O-Methyl Cytosine
  misc_feature (33)..(33): The 2'O-Methyl guanosine is attached through the linker Hexaethyleneglycol spacer to 2'O-Methyl guanosine of  SEQ ID NO: 319
  modified_base (33)..(33): gm

SEQ ID NO: 176 - RNA, 67 nt, Artificial Sequence
  aptamer
  misc_feature (1)..(1): The 2'O-Methyl cytosine is attached  through the linker 1,3-propanediolspacer to 2'O-Methyl cytosine of another nucleotide sequence CXAC
  modified_base (1)..(2): 2'O-Methyl Cytosine
  modified_base (3)..(3): 2' Fluoro Guanosine
  modified_base (4)..(4): 2'O-Methyl Cytosine
  modified_base (5)..(5): 2' Fluoro Guanosine
  modified_base (6)..(6): 2'O-Methyl Cytosine
  modified_base (7)..(8): 2' Fluoro Guanosine
  modified_base (9)..(9): 2'O-Methyl Adenosine
  modified_base (10)..(12): 2' Fluoro Guanosine
  modified_base (14)..(16): um
  modified_base (17)..(17): 2'O-Methyl Cytosine
  modified_base (18)..(18): 2'O-Methyl Adenosine
  modified_base (19)..(19): um
  modified_base (20)..(21): 2'O-Methyl Adenosine
  modified_base (23)..(25): 2'O-Methyl Cytosine
  modified_base (26)..(26): 2' Fluoro Guanosine
  modified_base (32)..(32): 2'O-Methyl Cytosine
  misc_feature (34)..(38): 2'O-Methyl deoxyuridine linker
  modified_base (34)..(38): 2'O-Methyl deoxyuridine
  modified_base (40)..(40): 2'O-Methyl Cytosine
  modified_base (44)..(46): 2' Fluoro Guanosine
  modified_base (47)..(49): 2'O-Methyl Adenosine
  modified_base (51)..(51): 2' Fluoro Guanosine
  modified_base (53)..(53): 2' Fluoro Guanosine
  modified_base (54)..(54): 2'O-Methyl Adenosine
  modified_base (55)..(55): 2' Fluoro Guanosine
  modified_base (56)..(56): 2'O-Methyl Adenosine
  modified_base (58)..(60): 2' Fluoro Guanosine
  modified_base (64)..(65): 2'O-Methyl Cytosine
  modified_base (67)..(67): 2'O-Methyl Cytosine
ccgcgcggagggguuucauaaucccguuugucguuuuugcggugggaaaugugagauggguugccgc

SEQ ID NO: 177 - RNA, 72 nt, Artificial Sequence
  aptamer
  modified_base (1)..(2): 2'O-Methyl Cytosine
  misc_feature (1)..(1): The 2'O-Methyl cytosine is attached  through the linker 1,3-propanediolspacer to 2'O-Methyl cytosine of another nucleotide sequence CXAC
  modified_base (3)..(3): 2' Fluoro Guanosine
  modified_base (4)..(4): 2'O-Methyl Cytosine
  modified_base (5)..(5): 2' Fluoro Guanosine
  modified_base (6)..(6): 2'O-Methyl Cytosine
  modified_base (7)..(8): 2' Fluoro Guanosine
  modified_base (9)..(9): 2'O-Methyl Adenosine
  modified_base (10)..(12): 2' Fluoro Guanosine
  modified_base (13)..(13): gm
  modified_base (14)..(16): um
  modified_base (17)..(17): 2'O-Methyl Cytosine
  modified_base (18)..(18): 2'O-Methyl Adenosine
  modified_base (19)..(19): um
  modified_base (20)..(21): 2'O-Methyl Adenosine
  modified_base (22)..(22): um
  modified_base (23)..(25): 2'O-Methyl Cytosine
  modified_base (26)..(26): 2' Fluoro Guanosine
  modified_base (27)..(29): um
  modified_base (30)..(30): gm
  modified_base (31)..(31): um
  modified_base (32)..(32): 2'O-Methyl Cytosine
  modified_base (33)..(33): gm
  modified_base (34)..(43): 2'O-Methyl deoxyuridine
  misc_feature (34)..(43): 2'O-Methyl deoxyuridine linker
  modified_base (44)..(44): gm
  modified_base (45)..(45): 2'O-Methyl Cytosine
  modified_base (46)..(47): gm
  modified_base (48)..(48): um
  modified_base (49)..(51): 2' Fluoro Guanosine
  modified_base (52)..(54): 2'O-Methyl Adenosine
  modified_base (55)..(55): um
  modified_base (56)..(56): 2' Fluoro Guanosine
  modified_base (57)..(57): um
  modified_base (58)..(58): 2' Fluoro Guanosine
  modified_base (59)..(59): 2'O-Methyl Adenosine
  modified_base (60)..(60): 2' Fluoro Guanosine
  modified_base (61)..(61): 2'O-Methyl Adenosine
  modified_base (62)..(62): um
  modified_base (63)..(65): 2' Fluoro Guanosine
  modified_base (66)..(67): um
  modified_base (68)..(68): gm
  modified_base (69)..(70): 2'O-Methyl Cytosine
  modified_base (71)..(71): gm
  modified_base (72)..(72): 2'O-Methyl Cytosine
ccgcgcggagggguuucauaaucccguuugucguuuuuuuuuugcggugggaaaugugagauggguugccgc

SEQ ID NO: 178 - RNA, 33 nt, Artificial Sequence
  aptamer
  modified_base (2)..(2): 2'O-Methyl Cytosine
  modified_base (5)..(5): um
  modified_base (6)..(8): 2' Fluoro Guanosine
  modified_base (9)..(11): 2'O-Methyl Adenosine
  modified_base (9)..(11): gm
  modified_base (12)..(12): um
  modified_base (13)..(13): 2' Fluoro Guanosine
  modified_base (14)..(14): um
  modified_base (15)..(15): 2' Fluoro Guanosine
  modified_base (16)..(16): 2'O-Methyl Adenosine
  modified_base (16)..(16): gm
  modified_base (17)..(17): 2' Fluoro Guanosine
  modified_base (18)..(18): 2'O-Methyl Adenosine
  modified_base (18)..(18): gm
  modified_base (19)..(19): um
  modified_base (20)..(22): 2' Fluoro Guanosine
  modified_base (23)..(24): um
  modified_base (26)..(27): 2'O-Methyl Cytosine
  modified_base (29)..(29): 2'O-Methyl Cytosine
  modified_base (30)..(30): 2'O-Methyl Cytosine
  modified_base (31)..(31): gm
  modified_base (32)..(32): 2'O-Methyl Adenosine
  modified_base (33)..(33): 2'O-Methyl Cytosine
  misc_feature (33)..(33): The 2'O-Methyl cytosine is attached  through the linker 1,3-propanediolspacer to 2'O-Methyl cytosine of SEQ ID NO: 320
gcggugggaaaugugagauggguugccgccgac

SEQ ID NO: 179 - RNA, 29 nt, Artificial Sequence
  aptamer
  modified_base (1)..(1): gm
  modified_base (2)..(2): 2'O-Methyl Cytosine
  modified_base (3)..(4): gm
  modified_base (5)..(5): um
  modified_base (6)..(8): 2' Fluoro Guanosine
  modified_base (9)..(11): 2'O-Methyl Adenosine
  modified_base (12)..(12): um
  modified_base (13)..(13): 2' Fluoro Guanosine
  modified_base (14)..(14): um
  modified_base (16)..(16): 2'O-Methyl Adenosine
  modified_base (17)..(17): 2' Fluoro Guanosine
  modified_base (18)..(18): 2'O-Methyl Adenosine
  modified_base (19)..(19): um
  modified_base (20)..(22): 2' Fluoro Guanosine
  modified_base (23)..(24): um
  modified_base (25)..(25): gm
  modified_base (26)..(27): 2'O-Methyl Cytosine
  modified_base (28)..(28): gm
  modified_base (29)..(29): 2'O-Methyl Cytosine
  misc_feature (29)..(29): The 2'O-Methyl cytosine is attached  through the linker 1,3-propanediolspacer to 2'O-Methyl cytosine of another nucleotide sequence CXAC
gcggugggaaaugugagauggguugccgc

SEQ ID NO: 180 - RNA, 29 nt, Artificial Sequence
  aptamer
  modified_base (1)..(1): gm
  modified_base (2)..(2): 2'O-Methyl Cytosine
  modified_base (3)..(4): gm
  modified_base (5)..(5): um
  modified_base (6)..(8): 2' Fluoro Guanosine
  modified_base (9)..(11): 2'O-Methyl Adenosine
  modified_base (12)..(12): um
  modified_base (13)..(13): 2' Fluoro Guanosine
  modified_base (14)..(14): um
  modified_base (15)..(15): 2' Fluoro Guanosine
  modified_base (16)..(16): 2'O-Methyl Adenosine
  modified_base (17)..(17): 2' Fluoro Guanosine
  modified_base (18)..(18): 2'O-Methyl Adenosine
  modified_base (19)..(19): um
  modified_base (20)..(22): 2' Fluoro Guanosine
  modified_base (23)..(24): um
  modified_base (25)..(25): gm
  modified_base (26)..(26): 2'O-Methyl Cytosine
  modified_base (27)..(27): 2'O-Methyl Cytosine
  modified_base (28)..(28): gm
  modified_base (29)..(29): 2'O-Methyl Cytosine
  misc_feature (29)..(29): The 2'O-Methyl cytosine is attached  through the linker Hexaethyleneglycol spacer to 2'O-Methyl cytosine of another nucleotide sequence CXAC
gcggugggaaaugugagauggguugccgc

SEQ ID NO: 181 - RNA, 38 nt, Artificial Sequence
  aptamer
  modified_base (1)..(1): gm
  modified_base (2)..(2): 2'O-Methyl Cytosine
  modified_base (3)..(4): gm
  modified_base (5)..(5): um
  modified_base (6)..(8): 2' Fluoro Guanosine
  modified_base (9)..(11): 2'O-Methyl Adenosine
  modified_base (12)..(12): um
  modified_base (13)..(13): 2' Fluoro Guanosine
  modified_base (14)..(14): um
  modified_base (15)..(15): 2' Fluoro Guanosine
  modified_base (16)..(16): 2'O-Methyl Adenosine
  modified_base (17)..(17): 2' Fluoro Guanosine
  modified_base (18)..(18): 2'O-Methyl Adenosine
  modified_base (19)..(19): um
  modified_base (20)..(22): 2' Fluoro Guanosine
  modified_base (23)..(24): um
  modified_base (25)..(25): gm
  modified_base (26)..(27): 2'O-Methyl Cytosine
  modified_base (28)..(28): gm
  modified_base (29)..(29): 2'O-Methyl Cytosine
  modified_base (30)..(34): 2'O-Methyl deoxyuridine
  misc_feature (30)..(34): 2'O-Methyl deoxyuridine linker
  modified_base (35)..(35): 2'O-Methyl Cytosine
  modified_base (36)..(36): gm
  modified_base (37)..(37): 2'O-Methyl Adenosine
  modified_base (38)..(38): 2'O-Methyl Cytosine
  misc_feature (38)..(38): The 2'O-Methyl cytosine is attached  through the linker 1,3-propanediolspacer to 2'O-Methyl cytosine of SEQ ID NO: 323
gcggugggaaaugugagauggguugccgcuuuuucgac

SEQ ID NO: 182 - RNA, 39 nt, Artificial Sequence
  aptamer
  modified_base (1)..(1): gm
  modified_base (2)..(2): 2'O-Methyl Cytosine
  modified_base (3)..(4): gm
  modified_base (5)..(5): um
  modified_base (6)..(8): 2' Fluoro Guanosine
  modified_base (9)..(11): 2'O-Methyl Adenosine
  modified_base (12)..(12): um
  modified_base (13)..(13): 2' Fluoro Guanosine
  modified_base (14)..(14): um
  modified_base (15)..(15): 2' Fluoro Guanosine
  modified_base (16)..(16): 2'O-Methyl Adenosine
  modified_base (17)..(17): 2' Fluoro Guanosine
  modified_base (18)..(18): 2'O-Methyl Adenosine
  modified_base (19)..(19): um
  modified_base (20)..(22): 2' Fluoro Guanosine
  modified_base (23)..(24): um
  modified_base (25)..(25): gm
  modified_base (26)..(27): 2'O-Methyl Cytosine
  modified_base (28)..(28): gm
  modified_base (29)..(29): 2'O-Methyl Cytosine
  modified_base (30)..(39): 2'O-Methyl deoxyuridine
  misc_feature (30)..(39): 2'O-Methyl deoxyuridine linker is attached to 2'O-Methyl cytosine of another nucleotide sequence CXAC
gcggugggaaaugugagauggguugccgcuuuuuuuuuu

SEQ ID NO: 183 - RNA, 64 nt, Artificial Sequence
  aptamer
  modified_base (1)..(2): 2'O-Methyl Cytosine
  misc_feature (1)..(1): The 2'O-Methyl cytosine is attached  through the linker 1,3-propanediolspacer to 2'O-Methyl cytosine of another nucleotide sequence XCCXAC
  modified_base (3)..(3): 2' Fluoro Guanosine
  modified_base (4)..(4): 2'O-Methyl Cytosine
  modified_base (5)..(5): 2' Fluoro Guanosine
  modified_base (6)..(6): 2'O-Methyl Cytosine
  modified_base (7)..(8): 2' Fluoro Guanosine
  modified_base (9)..(9): 2'O-Methyl Adenosine
  modified_base (10)..(12): 2' Fluoro Guanosine
  modified_base (13)..(13): gm
  modified_base (14)..(16): um
  modified_base (17)..(17): 2'O-Methyl Cytosine
  modified_base (18)..(18): 2'O-Methyl Adenosine
  modified_base (19)..(19): um
  modified_base (20)..(21): 2'O-Methyl Adenosine
  modified_base (22)..(22): um
  modified_base (23)..(25): 2'O-Methyl Cytosine
  modified_base (26)..(26): 2' Fluoro Guanosine
  modified_base (27)..(29): um
  modified_base (30)..(30): gm
  modified_base (31)..(31): um
  modified_base (32)..(32): 2'O-Methyl Cytosine
  modified_base (33)..(34): gm
  modified_base (35)..(35): 2'O-Methyl Cytosine
  modified_base (36)..(36): gm
  modified_base (37)..(37): 2'O-Methyl Cytosine
  modified_base (38)..(39): gm
  modified_base (40)..(40): um
  modified_base (41)..(43): 2' Fluoro Guanosine
  modified_base (44)..(46): 2'O-Methyl Adenosine
  modified_base (47)..(47): um
  modified_base (48)..(48): 2' Fluoro Guanosine
  modified_base (49)..(49): um
  modified_base (50)..(50): 2' Fluoro Guanosine
  modified_base (51)..(51): 2'O-Methyl Adenosine
  modified_base (52)..(52): 2' Fluoro Guanosine
  modified_base (53)..(53): 2'O-Methyl Adenosine
  modified_base (54)..(54): um
  modified_base (55)..(57): 2' Fluoro Guanosine
  modified_base (58)..(59): um
  modified_base (60)..(60): gm
  modified_base (61)..(62): 2'O-Methyl Cytosine
  modified_base (63)..(63): gm
  modified_base (64)..(64): 2'O-Methyl Cytosine
ccgcgcggagggguuucauaaucccguuugucggcgcggugggaaaugugagauggguugccgc

SEQ ID NO: 184 - RNA, 35 nt, Artificial Sequence; identical to SEQ ID NO: 67
  aptamer
  modified_base (1)..(2): 2'O-Methyl Cytosine
  misc_feature (1)..(1): The 2'O-Methyl cytosine is attached  through the linker 1,3-propanediolspacer to 2'O-Methyl cytosine of another nucleotide sequence XCCXAC
  modified_base (3)..(3): 2' Fluoro Guanosine
  modified_base (4)..(4): 2'O-Methyl Cytosine
  modified_base (5)..(5): 2' Fluoro Guanosine
  modified_base (6)..(6): 2'O-Methyl Cytosine
  modified_base (7)..(8): 2' Fluoro Guanosine
  modified_base (9)..(9): 2'O-Methyl Adenosine
  modified_base (10)..(12): 2' Fluoro Guanosine
  modified_base (13)..(13): gm
  modified_base (14)..(16): um
  modified_base (17)..(17): 2'O-Methyl Cytosine
  modified_base (18)..(18): 2'O-Methyl Adenosine
  modified_base (19)..(19): um
  modified_base (20)..(21): 2'O-Methyl Adenosine
  modified_base (22)..(22): um
  modified_base (23)..(25): 2'O-Methyl Cytosine
  modified_base (26)..(26): 2' Fluoro Guanosine
  modified_base (27)..(29): um
  modified_base (30)..(30): gm
  modified_base (31)..(31): um
  modified_base (32)..(32): 2'O-Methyl Cytosine
  modified_base (33)..(34): gm
  modified_base (35)..(35): 2'O-Methyl Cytosine
  misc_feature (35)..(35): The 2'O-Methyl cytosine is attached  through the linker 1,3-propanediolspacer to 2'O-Methyl guanosine of SEQ ID NO: 325

SEQ ID NO: 185 - RNA, 35 nt, Artificial Sequence; identical to SEQ ID NO: 67
  aptamer
  modified_base (1)..(2): 2'O-Methyl Cytosine
  misc_feature (1)..(1): The 2'O-Methyl cytosine is attached  through the linker 1,3-propanediolspacer to 2'O-Methyl cytosine of another nucleotide sequence XCCXAC
  modified_base (3)..(3): 2' Fluoro Guanosine
  modified_base (4)..(4): 2'O-Methyl Cytosine
  modified_base (5)..(5): 2' Fluoro Guanosine
  modified_base (6)..(6): 2'O-Methyl Cytosine
  modified_base (7)..(8): 2' Fluoro Guanosine
  modified_base (9)..(9): 2'O-Methyl Adenosine
  modified_base (10)..(12): 2' Fluoro Guanosine
  modified_base (13)..(13): gm
  modified_base (14)..(16): um
  modified_base (17)..(17): 2'O-Methyl Cytosine
  modified_base (18)..(18): 2'O-Methyl Adenosine
  modified_base (19)..(19): um
  modified_base (20)..(21): 2'O-Methyl Adenosine
  modified_base (22)..(22): um
  modified_base (23)..(25): 2'O-Methyl Cytosine
  modified_base (26)..(26): 2' Fluoro Guanosine
  modified_base (27)..(29): um
  modified_base (30)..(30): gm
  modified_base (31)..(31): um
  modified_base (32)..(32): 2'O-Methyl Cytosine
  modified_base (33)..(34): gm
  modified_base (35)..(35): 2'O-Methyl Cytosine
  misc_feature (35)..(35): The 2'O-Methyl cytosine is attached through the linker Hexaethyleneglycol spacer to 2'O-Methyl guanosine of  SEQ ID NO: 326

SEQ ID NO: 186 - RNA, 69 nt, Artificial Sequence
  aptamer
  modified_base (1)..(2): 2'O-Methyl Cytosine
  misc_feature (1)..(1): The 2'O-Methyl cytosine is attached  through the linker 1,3-propanediolspacer to 2'O-Methyl cytosine of another nucleotide sequence XCCXAC
  modified_base (3)..(3): 2' Fluoro Guanosine
  modified_base (4)..(4): 2'O-Methyl Cytosine
  modified_base (5)..(5): 2' Fluoro Guanosine
  modified_base (6)..(6): 2'O-Methyl Cytosine
  modified_base (7)..(8): 2' Fluoro Guanosine
  modified_base (9)..(9): 2'O-Methyl Adenosine
  modified_base (10)..(12): 2' Fluoro Guanosine
  modified_base (13)..(13): gm
  modified_base (14)..(16): um
  modified_base (17)..(17): 2'O-Methyl Cytosine
  modified_base (18)..(18): 2'O-Methyl Adenosine
  modified_base (19)..(19): um
  modified_base (20)..(21): 2'O-Methyl Adenosine
  modified_base (22)..(22): um
  modified_base (23)..(25): 2'O-Methyl Cytosine
  modified_base (26)..(26): 2' Fluoro Guanosine
  modified_base (27)..(29): um
  modified_base (30)..(30): gm
  modified_base (31)..(31): um
  modified_base (32)..(32): 2'O-Methyl Cytosine
  modified_base (33)..(34): gm
  modified_base (35)..(35): 2'O-Methyl Cytosine
  modified_base (36)..(40): 2'O-Methyl deoxyuridine
  misc_feature (36)..(40): 2'O-Methyl deoxyuridine linker
  modified_base (41)..(41): gm
  modified_base (42)..(42): 2'O-Methyl Cytosine
  modified_base (43)..(44): gm
  modified_base (45)..(45): um
  modified_base (46)..(48): 2' Fluoro Guanosine
  modified_base (49)..(51): 2'O-Methyl Adenosine
  modified_base (52)..(52): um
  modified_base (53)..(53): 2' Fluoro Guanosine
  modified_base (54)..(54): um
  modified_base (55)..(55): 2' Fluoro Guanosine
  modified_base (56)..(56): 2'O-Methyl Adenosine
  modified_base (57)..(57): 2' Fluoro Guanosine
  modified_base (58)..(58): 2'O-Methyl Adenosine
  modified_base (59)..(59): um
  modified_base (60)..(62): 2' Fluoro Guanosine
  modified_base (63)..(64): um
  modified_base (65)..(65): gm
  modified_base (66)..(67): 2'O-Methyl Cytosine
  modified_base (68)..(68): gm
  modified_base (69)..(69): 2'O-Methyl Cytosine
ccgcgcggagggguuucauaaucccguuugucggcuuuuugcggugggaaaugugagauggguugccgc

SEQ ID NO: 187 - RNA, 74 nt, Artificial Sequence
  aptamer
  modified_base (1)..(2): 2'O-Methyl Cytosine
  misc_feature (1)..(1): The 2'O-Methyl cytosine is attached  through the linker 1,3-propanediolspacer to 2'O-Methyl cytosine of another nucleotide sequence XCCXAC
  modified_base (3)..(3): 2' Fluoro Guanosine
  modified_base (4)..(4): 2'O-Methyl Cytosine
  modified_base (5)..(5): 2' Fluoro Guanosine
  modified_base (6)..(6): 2'O-Methyl Cytosine
  modified_base (7)..(8): 2' Fluoro Guanosine
  modified_base (9)..(9): 2'O-Methyl Adenosine
  modified_base (10)..(12): 2' Fluoro Guanosine
  modified_base (13)..(13): gm
  modified_base (14)..(16): 2'O-Methyl Uridine
  modified_base (17)..(17): 2'O-Methyl Cytosine
  modified_base (18)..(18): 2'O-Methyl Adenosine
  modified_base (19)..(19): 2'O-Methyl Uridine
  modified_base (20)..(20): 2'O-Methyl Adenosine
  modified_base (20)..(21): 2'O-Methyl Adenosine
  modified_base (22)..(22): 2'O-Methyl Cytosine
  modified_base (23)..(25): 2'O-Methyl Cytosine
  modified_base (26)..(26): 2' Fluoro Guanosine
  modified_base (27)..(29): 2'O-Methyl Uridine
  modified_base (30)..(30): gm
  modified_base (31)..(31): 2'O-Methyl Uridine
  modified_base (32)..(32): 2'O-Methyl Cytosine
  modified_base (33)..(34): gm
  modified_base (35)..(35): 2'O-Methyl Cytosine
  modified_base (36)..(45): 2'O-Methyl deoxyuridine
  misc_feature (36)..(45): 2'O-Methyl deoxyuridine linker
  modified_base (46)..(46): gm
  modified_base (47)..(47): 2'O-Methyl Cytosine
  modified_base (48)..(49): gm
  modified_base (50)..(50): 2'O-Methyl Uridine
  modified_base (51)..(53): 2' Fluoro Guanosine
  modified_base (54)..(56): 2'O-Methyl Adenosine
  modified_base (57)..(57): 2'O-Methyl Uridine
  modified_base (58)..(58): 2' Fluoro Guanosine
  modified_base (59)..(59): 2'O-Methyl Uridine
  modified_base (60)..(60): 2' Fluoro Guanosine
  modified_base (61)..(61): 2'O-Methyl Adenosine
  modified_base (62)..(62): 2' Fluoro Guanosine
  modified_base (63)..(63): 2'O-Methyl Adenosine
  modified_base (64)..(64): 2'O-Methyl Uridine
  modified_base (65)..(67): 2' Fluoro Guanosine
  modified_base (68)..(69): 2'O-Methyl Uridine
  modified_base (70)..(70): gm
  modified_base (71)..(72): 2'O-Methyl Cytosine
  modified_base (73)..(73): gm
  modified_base (74)..(74): 2'O-Methyl Cytosine
ccgcgcggagggguuucauaaucccguuugucggcuuuuuuuuuugcggugggaaaugugagauggguugccgc

SEQ ID NO: 188 - RNA, 35 nt, Artificial Sequence
  aptamer
  modified_base (1)..(1): gm
  modified_base (2)..(2): 2'O-Methyl Cytosine
  modified_base (3)..(4): gm
  modified_base (5)..(5): um
  modified_base (6)..(8): 2' Fluoro Guanosine
  modified_base (9)..(11): 2'O-Methyl Adenosine
  modified_base (12)..(12): um
  modified_base (13)..(13): 2' Fluoro Guanosine
  modified_base (13)..(13): gm
  modified_base (14)..(14): um
  modified_base (15)..(15): 2' Fluoro Guanosine
  modified_base (16)..(16): 2'O-Methyl Adenosine
  modified_base (17)..(17): 2' Fluoro Guanosine
  modified_base (18)..(18): 2'O-Methyl Adenosine
  modified_base (19)..(19): um
  modified_base (20)..(22): 2' Fluoro Guanosine
  modified_base (23)..(24): um
  modified_base (25)..(25): gm
  modified_base (26)..(29): 2'O-Methyl Cytosine
  modified_base (28)..(28): gm
  modified_base (30)..(30): gm
  modified_base (31)..(32): 2'O-Methyl Cytosine
  modified_base (33)..(33): gm
  modified_base (34)..(34): 2'O-Methyl Adenosine
  modified_base (35)..(35): 2'O-Methyl Cytosine
  misc_feature (35)..(35): The 2'O-Methyl cytosine is attached  through the linker 1,3-propanediolspacer to 2'O-Methyl cytosine of SEQ ID NO: 327
gcggugggaaaugugagauggguugccgcgccgac

SEQ ID NO: 189 - RNA, 29 nt, Artificial Sequence
  aptamer
  modified_base (1)..(1): gm
  modified_base (2)..(2): 2'O-Methyl Cytosine
  modified_base (3)..(4): gm
  modified_base (5)..(5): um
  modified_base (6)..(8): 2' Fluoro Guanosine
  modified_base (9)..(11): 2'O-Methyl Adenosine
  modified_base (12)..(12): um
  modified_base (13)..(13): 2' Fluoro Guanosine
  modified_base (14)..(14): um
  modified_base (15)..(15): 2' Fluoro Guanosine
  modified_base (16)..(16): 2'O-Methyl Adenosine
  modified_base (17)..(17): 2' Fluoro Guanosine
  modified_base (18)..(18): 2'O-Methyl Adenosine
  modified_base (19)..(19): um
  modified_base (20)..(22): 2' Fluoro Guanosine
  modified_base (23)..(24): um
  modified_base (25)..(25): gm
  modified_base (26)..(27): 2'O-Methyl Cytosine
  modified_base (28)..(28): gm
  modified_base (29)..(29): 2'O-Methyl Cytosine
  misc_feature (29)..(29): The 2'O-Methyl cytosine is attached  through the linker 1,3-propanediolspacer to 2'O-Methyl cytosine of another nucleotide sequence XCCXAC
gcggugggaaaugugagauggguugccgc

SEQ ID NO: 190 - RNA, 29 nt, Artificial Sequence
  aptamer
  modified_base (1)..(1): gm
  modified_base (2)..(2): 2'O-Methyl Cytosine
  modified_base (3)..(4): gm
  modified_base (5)..(5): um
  modified_base (6)..(8): 2' Fluoro Guanosine
  modified_base (9)..(11): 2'O-Methyl Adenosine
  modified_base (12)..(12): um
  modified_base (13)..(13): 2' Fluoro Guanosine
  modified_base (14)..(14): um
  modified_base (15)..(15): 2' Fluoro Guanosine
  modified_base (16)..(16): 2'O-Methyl Adenosine
  modified_base (17)..(17): 2' Fluoro Guanosine
  modified_base (18)..(18): 2'O-Methyl Adenosine
  modified_base (19)..(19): um
  modified_base (20)..(22): 2' Fluoro Guanosine
  modified_base (23)..(24): um
  modified_base (25)..(25): gm
  modified_base (26)..(27): 2'O-Methyl Cytosine
  modified_base (28)..(28): gm
  modified_base (29)..(29): 2'O-Methyl Cytosine
  misc_feature (29)..(29): The 2'O-Methyl cytosine is attached through the linker Hexaethyleneglycol spacer to 2'O-Methyl guanosine of another nucleotide sequence XCCXAC
gcggugggaaaugugagauggguugccgc

SEQ ID NO: 191 - RNA, 40 nt, Artificial Sequence
  aptamer
  modified_base (1)..(1): gm
  modified_base (2)..(2): 2'O-Methyl Cytosine
  modified_base (3)..(4): gm
  modified_base (5)..(5): um
  modified_base (6)..(8): 2' Fluoro Guanosine
  modified_base (9)..(11): 2'O-Methyl Adenosine
  modified_base (12)..(12): um
  modified_base (13)..(13): 2' Fluoro Guanosine
  modified_base (14)..(14): um
  modified_base (15)..(15): 2' Fluoro Guanosine
  modified_base (16)..(16): 2'O-Methyl Adenosine
  modified_base (17)..(17): 2' Fluoro Guanosine
  modified_base (18)..(18): 2'O-Methyl Adenosine
  modified_base (19)..(19): um
  modified_base (20)..(22): 2' Fluoro Guanosine
  modified_base (23)..(24): um
  modified_base (25)..(25): gm
  modified_base (26)..(27): 2'O-Methyl Cytosine
  modified_base (28)..(28): gm
  modified_base (29)..(29): 2'O-Methyl Cytosine
  modified_base (30)..(34): 2'O-Methyl deoxyuridine
  misc_feature (30)..(34): 2'O-Methyl deoxyuridine linker
  modified_base (35)..(35): gm
  modified_base (36)..(37): 2'O-Methyl Cytosine
  modified_base (38)..(38): gm
  modified_base (39)..(39): 2'O-Methyl Adenosine
  modified_base (40)..(40): 2'O-Methyl Cytosine
  misc_feature (40)..(40): The 2'O-Methyl cytosine is attached  through the linker 1,3-propanediolspacer to 2'O-Methyl cytosine of SEQ ID NO: 330
gcggugggaaaugugagauggguugccgcuuuuugccgac

SEQ ID NO: 192 - RNA, 45 nt, Artificial Sequence
  aptamer
  modified_base (1)..(1): gm
  modified_base (2)..(2): 2'O-Methyl Cytosine
  modified_base (3)..(4): gm
  modified_base (5)..(5): um
  modified_base (6)..(8): 2' Fluoro Guanosine
  modified_base (9)..(11): 2'O-Methyl Adenosine
  modified_base (12)..(12): um
  modified_base (13)..(13): 2' Fluoro Guanosine
  modified_base (14)..(14): um
  modified_base (15)..(15): 2' Fluoro Guanosine
  modified_base (16)..(16): 2'O-Methyl Adenosine
  modified_base (17)..(17): 2' Fluoro Guanosine
  modified_base (18)..(18): 2'O-Methyl Adenosine
  modified_base (19)..(19): um
  modified_base (20)..(22): 2' Fluoro Guanosine
  modified_base (23)..(24): um
  modified_base (25)..(25): gm
  modified_base (26)..(27): 2'O-Methyl Cytosine
  modified_base (28)..(28): gm
  modified_base (29)..(29): 2'O-Methyl Cytosine
  modified_base (30)..(39): 2'O-Methyl deoxyuridine
  misc_feature (30)..(39): 2'O-Methyl deoxyuridine linker
  modified_base (40)..(40): gm
  modified_base (41)..(42): 2'O-Methyl Cytosine
  modified_base (43)..(43): gm
  modified_base (44)..(44): 2'O-Methyl Adenosine
  modified_base (45)..(45): 2'O-Methyl Cytosine
  misc_feature (45)..(45): The 2'O-Methyl cytosine is attached  through the linker 1,3-propanediolspacer to 2'O-Methyl cytosine of SEQ ID NO: 331
gcggugggaaaugugagauggguugccgcuuuuuuuuuugccgac

SEQ ID NO: 193 - RNA, 33 nt, Artificial Sequence
  aptamer
  modified_base (1)..(1): gm
  modified_base (2)..(2): 2'O-Methyl Cytosine
  modified_base (3)..(3): gm
  modified_base (4)..(4): 2'O-Methyl Cytosine
  modified_base (5)..(6): gm
  modified_base (7)..(7): um
  modified_base (8)..(10): 2' Fluoro Guanosine
  modified_base (11)..(13): 2'O-Methyl Adenosine
  modified_base (14)..(14): um
  modified_base (15)..(15): 2' Fluoro Guanosine
  modified_base (16)..(16): um
  modified_base (17)..(17): 2' Fluoro Guanosine
  modified_base (18)..(18): 2'O-Methyl Adenosine
  modified_base (19)..(19): 2' Fluoro Guanosine
  modified_base (20)..(20): 2'O-Methyl Adenosine
  modified_base (21)..(21): um
  modified_base (22)..(24): 2' Fluoro Guanosine
  modified_base (25)..(26): um
  modified_base (25)..(26): inverted deoxythymidine incorporated at the 3'  end
  modified_base (27)..(27): gm
  modified_base (28)..(29): 2'O-Methyl Cytosine
  modified_base (30)..(30): gm
  modified_base (31)..(31): 2'O-Methyl Cytosine
  modified_base (32)..(32): gm
  modified_base (33)..(33): 2'O-Methyl Cytosine
gcgcggugggaaaugugagauggguugccgcgc

SEQ ID NO: 194 - RNA, 66 nt, Artificial Sequence
  aptamer
  modified_base (1)..(2): 2'O-Methyl Cytosine
  modified_base (3)..(3): 2' Fluoro Guanosine
  modified_base (4)..(4): 2'O-Methyl Cytosine
  modified_base (5)..(5): 2' Fluoro Guanosine
  modified_base (6)..(6): 2'O-Methyl Cytosine
  modified_base (7)..(8): 2' Fluoro Guanosine
  modified_base (9)..(9): 2'O-Methyl Adenosine
  modified_base (10)..(12): 2' Fluoro Guanosine
  modified_base (13)..(13): gm
  modified_base (14)..(16): um
  modified_base (17)..(17): 2'O-Methyl Cytosine
  modified_base (18)..(18): 2'O-Methyl Adenosine
  modified_base (19)..(19): um
  modified_base (20)..(21): 2'O-Methyl Adenosine
  modified_base (22)..(22): um
  modified_base (23)..(25): 2'O-Methyl Cytosine
  modified_base (26)..(26): 2' Fluoro Guanosine
  modified_base (27)..(29): um
  modified_base (30)..(30): gm
  modified_base (31)..(31): um
  modified_base (32)..(32): 2'O-Methyl Cytosine
  modified_base (33)..(34): gm
  modified_base (35)..(35): 2'O-Methyl Cytosine
  modified_base (36)..(36): gm
  modified_base (37)..(37): 2'O-Methyl Cytosine
  modified_base (38)..(39): gm
  modified_base (40)..(40): um
  modified_base (41)..(43): 2' Fluoro Guanosine
  modified_base (44)..(46): 2'O-Methyl Adenosine
  modified_base (47)..(47): um
  modified_base (48)..(48): 2' Fluoro Guanosine
  modified_base (49)..(49): um
  modified_base (50)..(50): 2' Fluoro Guanosine
  modified_base (51)..(51): 2'O-Methyl Adenosine
  modified_base (52)..(52): 2' Fluoro Guanosine
  modified_base (53)..(53): 2'O-Methyl Adenosine
  modified_base (54)..(54): um
  modified_base (55)..(57): 2' Fluoro Guanosine
  modified_base (58)..(59): um
  modified_base (60)..(60): gm
  modified_base (61)..(62): 2'O-Methyl Cytosine
  modified_base (63)..(63): gm
  modified_base (64)..(64): 2'O-Methyl Cytosine
  modified_base (65)..(65): gm
  modified_base (66)..(66): 2'O-Methyl Cytosine
  modified_base (66)..(66): inverted deoxythymidine incorporated at the 3'  end
ccgcgcggagggguuucauaaucccguuugucggcgcggugggaaaugugagauggguugccgcgc

SEQ ID NO: 195 - RNA, 33 nt, Artificial Sequence; identical to SEQ ID NO: 1
  aptamer
  modified_base (1)..(2): 2'O-Methyl Adenosine
  modified_base (3)..(3): 2' Fluoro Guanosine
  modified_base (4)..(4): 2'O-Methyl Adenosine
  modified_base (5)..(5): 2' Fluoro Guanosine
  modified_base (6)..(6): 2'O-Methyl Adenosine
  modified_base (7)..(8): 2' Fluoro Guanosine
  modified_base (9)..(9): 2'O-Methyl Adenosine
  modified_base (10)..(12): 2' Fluoro Guanosine
  modified_base (13)..(13): gm
  modified_base (14)..(16): um
  modified_base (17)..(17): 2'O-Methyl Adenosine
  modified_base (18)..(18): 2'O-Methyl Adenosine
  modified_base (19)..(19): um
  modified_base (20)..(21): 2'O-Methyl Adenosine
  modified_base (22)..(22): um
  modified_base (23)..(25): 2'O-Methyl Adenosine
  modified_base (26)..(26): 2' Fluoro Guanosine
  modified_base (27)..(29): um
  modified_base (30)..(30): gm
  modified_base (31)..(31): um
  modified_base (32)..(32): 2'O-Methyl Adenosine
  misc_feature (33)..(33): The 2'O-Methyl guanosine is attached  through the linker 1,3-propanediolspacer to 2'O-Methyl guanosine of SEQ ID NO: 332
  modified_base (33)..(33): gm

SEQ ID NO: 196 - RNA, 33 nt, Artificial Sequence; identical to SEQ ID NO: 1
  aptamer
  modified_base (1)..(2): 2'O-Methyl Cytosine
  misc_feature (1)..(1): The 2'O-Methyl cytosine is attached  through the linker 1,3-propanediolspacer to 2'O-Methyl cytosine of another nucleotide sequence CXAC
  modified_base (3)..(3): 2' Fluoro Guanosine
  modified_base (4)..(4): 2'O-Methyl Cytosine
  modified_base (5)..(5): 2' Fluoro Guanosine
  modified_base (6)..(6): 2'O-Methyl Cytosine
  modified_base (7)..(8): 2' Fluoro Guanosine
  modified_base (9)..(9): 2'O-Methyl Adenosine
  modified_base (10)..(12): 2' Fluoro Guanosine
  modified_base (13)..(13): gm
  modified_base (14)..(16): um
  modified_base (17)..(17): 2'O-Methyl Cytosine
  modified_base (18)..(18): 2'O-Methyl Adenosine
  modified_base (19)..(19): um
  modified_base (20)..(21): 2'O-Methyl Adenosine
  modified_base (22)..(22): um
  modified_base (23)..(25): 2'O-Methyl Cytosine
  modified_base (26)..(26): 2' Fluoro Guanosine
  modified_base (27)..(29): um
  modified_base (30)..(30): gm
  modified_base (31)..(31): um
  modified_base (32)..(32): 2'O-Methyl Cytosine
  modified_base (33)..(33): gm
  misc_feature (33)..(33): The 2'O-Methyl guanosine is attached through the linker Hexaethyleneglycol spacer to 2'O-Methyl guanosine of  SEQ ID NO: 333

SEQ ID NO: 197 - RNA, 71 nt, Artificial Sequence
  aptamer
  modified_base (1)..(2): 2'O-Methyl Cytosine
  misc_feature (1)..(1): The 2'O-Methyl cytosine is attached  through the linker 1,3-propanediolspacer to 2'O-Methyl cytosine of another nucleotide sequence CXAC
  modified_base (3)..(3): 2' Fluoro Guanosine
  modified_base (4)..(4): 2'O-Methyl Cytosine
  modified_base (5)..(5): 2' Fluoro Guanosine
  modified_base (6)..(6): 2'O-Methyl Cytosine
  modified_base (7)..(8): 2' Fluoro Guanosine
  modified_base (9)..(9): 2'O-Methyl Adenosine
  modified_base (10)..(12): 2' Fluoro Guanosine
  modified_base (13)..(13): gm
  modified_base (14)..(16): um
  modified_base (17)..(17): 2'O-Methyl Cytosine
  modified_base (18)..(18): 2'O-Methyl Adenosine
  modified_base (19)..(19): um
  modified_base (20)..(21): 2'O-Methyl Adenosine
  modified_base (22)..(22): um
  modified_base (23)..(25): 2'O-Methyl Cytosine
  modified_base (26)..(26): 2' Fluoro Guanosine
  modified_base (27)..(29): um
  modified_base (30)..(30): gm
  modified_base (31)..(31): um
  modified_base (32)..(32): 2'O-Methyl Cytosine
  modified_base (33)..(33): gm
  modified_base (34)..(38): 2'O-Methyl deoxyuridine
  misc_feature (34)..(38): 2'O-Methyl deoxyuridine linker
  modified_base (39)..(39): gm
  modified_base (40)..(40): 2'O-Methyl Cytosine
  modified_base (41)..(41): gm
  modified_base (42)..(42): 2'O-Methyl Cytosine
  modified_base (43)..(44): gm
  modified_base (45)..(45): um
  modified_base (46)..(48): 2' Fluoro Guanosine
  modified_base (49)..(51): 2'O-Methyl Adenosine
  modified_base (52)..(52): um
  modified_base (53)..(53): 2' Fluoro Guanosine
  modified_base (54)..(54): um
  modified_base (55)..(55): 2' Fluoro Guanosine
  modified_base (56)..(56): 2'O-Methyl Adenosine
  modified_base (57)..(57): 2' Fluoro Guanosine
  modified_base (58)..(58): 2'O-Methyl Adenosine
  modified_base (59)..(59): um
  modified_base (60)..(62): 2' Fluoro Guanosine
  modified_base (63)..(64): um
  modified_base (65)..(65): gm
  modified_base (66)..(67): 2'O-Methyl Cytosine
  modified_base (68)..(68): gm
  modified_base (69)..(69): 2'O-Methyl Cytosine
  modified_base (70)..(70): gm
  modified_base (71)..(71): 2'O-Methyl Cytosine
ccgcgcggagggguuucauaaucccguuugucguuuuugcgcggugggaaaugugagauggguugccgcgc

SEQ ID NO: 198 - RNA, 76 nt, Artificial Sequence
  aptamer
  modified_base (1)..(2): 2'O-Methyl Cytosine
  misc_feature (1)..(1): The 2'O-Methyl cytosine is attached  through the linker 1,3-propanediolspacer to 2'O-Methyl cytosine of another nucleotide sequence CXAC
  modified_base (3)..(3): 2' Fluoro Guanosine
  modified_base (4)..(4): 2'O-Methyl Cytosine
  modified_base (5)..(5): 2' Fluoro Guanosine
  modified_base (6)..(6): 2'O-Methyl Cytosine
  modified_base (7)..(8): 2' Fluoro Guanosine
  modified_base (9)..(18): 2'O-Methyl Adenosine
  modified_base (10)..(12): 2' Fluoro Guanosine
  modified_base (13)..(13): gm
  modified_base (14)..(16): um
  modified_base (17)..(17): 2'O-Methyl Cytosine
  modified_base (19)..(19): um
  modified_base (20)..(21): 2'O-Methyl Adenosine
  modified_base (22)..(22): um
  modified_base (23)..(25): 2'O-Methyl Cytosine
  modified_base (26)..(26): 2' Fluoro Guanosine
  modified_base (27)..(29): um
  modified_base (30)..(30): gm
  modified_base (31)..(31): um
  modified_base (32)..(32): 2'O-Methyl Cytosine
  modified_base (33)..(33): gm
  misc_feature (34)..(43): 2'O-Methyl deoxyuridine linker
  modified_base (34)..(43): 2'O-Methyl deoxyuridine
  modified_base (44)..(44): gm
  modified_base (45)..(45): 2'O-Methyl Cytosine
  modified_base (46)..(46): gm
  modified_base (47)..(47): 2'O-Methyl Cytosine
  modified_base (48)..(49): gm
  modified_base (50)..(50): um
  modified_base (51)..(53): 2' Fluoro Guanosine
  modified_base (54)..(56): 2'O-Methyl Adenosine
  modified_base (57)..(57): um
  modified_base (58)..(58): 2' Fluoro Guanosine
  modified_base (59)..(59): um
  modified_base (60)..(60): 2' Fluoro Guanosine
  modified_base (61)..(61): 2'O-Methyl Adenosine
  modified_base (62)..(62): 2' Fluoro Guanosine
  modified_base (63)..(63): 2'O-Methyl Adenosine
  modified_base (64)..(64): um
  modified_base (65)..(67): 2' Fluoro Guanosine
  modified_base (70)..(70): gm
  modified_base (71)..(72): 2'O-Methyl Cytosine
  modified_base (73)..(73): gm
  modified_base (74)..(74): 2'O-Methyl Cytosine
  modified_base (75)..(75): gm
  modified_base (76)..(76): 2'O-Methyl Cytosine
ccgcgcggagggguuucauaaucccguuugucguuuuuuuuuugcgcggugggaaaugugagauggguugccgcgc

SEQ ID NO: 199 - RNA, 37 nt, Artificial Sequence
  aptamer
  modified_base (1)..(1): gm
  modified_base (2)..(2): 2'O-Methyl Cytosine
  modified_base (3)..(3): gm
  modified_base (4)..(4): 2'O-Methyl Cytosine
  modified_base (5)..(6): gm
  modified_base (7)..(7): um
  modified_base (8)..(10): 2' Fluoro Guanosine
  modified_base (11)..(13): 2'O-Methyl Adenosine
  modified_base (14)..(14): um
  modified_base (15)..(15): 2' Fluoro Guanosine
  modified_base (16)..(16): um
  modified_base (17)..(17): 2' Fluoro Guanosine
  modified_base (18)..(18): 2'O-Methyl Adenosine
  modified_base (19)..(19): 2' Fluoro Guanosine
  modified_base (20)..(20): 2'O-Methyl Adenosine
  modified_base (21)..(21): um
  modified_base (22)..(24): 2' Fluoro Guanosine
  modified_base (25)..(26): um
  modified_base (27)..(27): gm
  modified_base (28)..(29): 2'O-Methyl Cytosine
  modified_base (30)..(30): gm
  modified_base (31)..(31): 2'O-Methyl Cytosine
  modified_base (32)..(32): gm
  modified_base (33)..(34): 2'O-Methyl Cytosine
  modified_base (35)..(35): gm
  modified_base (36)..(36): 2'O-Methyl Adenosine
  modified_base (37)..(37): 2'O-Methyl Cytosine
  misc_feature (37)..(37): The 2'O-Methyl cytosine is attached  through the linker 1,3-propanediolspacer to 2'O-Methyl cytosine of SEQ ID NO: 334
gcgcggugggaaaugugagauggguugccgcgccgac

SEQ ID NO: 200 - RNA, 33 nt, Artificial Sequence; identical to SEQ ID NO: 193
  aptamer
  modified_base (1)..(1): gm
  modified_base (2)..(2): 2'O-Methyl Cytosine
  modified_base (3)..(3): gm
  modified_base (4)..(4): 2'O-Methyl Cytosine
  modified_base (5)..(6): gm
  modified_base (7)..(7): um
  modified_base (8)..(10): 2' Fluoro Guanosine
  modified_base (11)..(13): 2'O-Methyl Adenosine
  modified_base (14)..(14): um
  modified_base (15)..(15): 2' Fluoro Guanosine
  modified_base (16)..(16): um
  modified_base (17)..(17): 2' Fluoro Guanosine
  modified_base (18)..(18): 2'O-Methyl Adenosine
  modified_base (19)..(19): 2' Fluoro Guanosine
  modified_base (20)..(20): 2'O-Methyl Adenosine
  modified_base (21)..(21): um
  modified_base (22)..(24): 2' Fluoro Guanosine
  modified_base (25)..(26): um
  modified_base (27)..(27): gm
  modified_base (28)..(29): 2'O-Methyl Cytosine
  modified_base (30)..(30): gm
  modified_base (31)..(31): 2'O-Methyl Cytosine
  modified_base (32)..(32): gm
  modified_base (33)..(33): 2'O-Methyl Cytosine
  misc_feature (33)..(33): The 2'O-Methyl cytosine is attached  through the linker 1,3-propanediolspacer to 2'O-Methyl cytosine of another nucleotide sequence CXAC

SEQ ID NO: 201 - RNA, 33 nt, Artificial Sequence; identical to SEQ ID NO: 193
  aptamer
  modified_base (1)..(1): gm
  modified_base (2)..(2): 2'O-Methyl Cytosine
  modified_base (3)..(3): gm
  modified_base (4)..(4): 2'O-Methyl Cytosine
  modified_base (5)..(6): gm
  modified_base (7)..(7): um
  modified_base (8)..(10): 2' Fluoro Guanosine
  modified_base (11)..(13): 2'O-Methyl Adenosine
  modified_base (14)..(14): um
  modified_base (15)..(15): 2' Fluoro Guanosine
  modified_base (16)..(16): um
  modified_base (17)..(17): 2' Fluoro Guanosine
  modified_base (18)..(18): 2'O-Methyl Adenosine
  modified_base (19)..(19): 2' Fluoro Guanosine
  modified_base (20)..(20): 2'O-Methyl Adenosine
  modified_base (21)..(21): um
  modified_base (22)..(24): 2' Fluoro Guanosine
  modified_base (25)..(26): um
  modified_base (27)..(27): gm
  modified_base (28)..(29): 2'O-Methyl Cytosine
  modified_base (30)..(30): gm
  modified_base (31)..(31): 2'O-Methyl Cytosine
  modified_base (32)..(32): gm
  modified_base (33)..(33): 2'O-Methyl Cytosine
  misc_feature (33)..(33): The 2'O-Methyl cytosine is attached  through the linker Hexaethyleneglycol spacer to 2'O-Methyl cytosine of another nucleotide sequence CXAC

SEQ ID NO: 202 - RNA, 42 nt, Artificial Sequence
  aptamer
  modified_base (1)..(1): gm
  modified_base (2)..(2): 2'O-Methyl Cytosine
  modified_base (3)..(3): gm
  modified_base (4)..(4): 2'O-Methyl Cytosine
  modified_base (5)..(6): gm
  modified_base (7)..(7): um
  modified_base (8)..(10): 2' Fluoro Guanosine
  modified_base (11)..(13): 2'O-Methyl Adenosine
  modified_base (14)..(14): um
  modified_base (15)..(15): 2' Fluoro Guanosine
  modified_base (16)..(16): um
  modified_base (17)..(17): 2' Fluoro Guanosine
  modified_base (18)..(18): 2'O-Methyl Adenosine
  modified_base (19)..(19): 2' Fluoro Guanosine
  modified_base (20)..(20): 2'O-Methyl Adenosine
  modified_base (21)..(21): um
  modified_base (22)..(24): 2' Fluoro Guanosine
  modified_base (25)..(26): um
  modified_base (27)..(27): gm
  modified_base (28)..(29): 2'O-Methyl Cytosine
  modified_base (30)..(30): gm
  modified_base (31)..(31): 2'O-Methyl Cytosine
  modified_base (32)..(32): gm
  modified_base (33)..(33): 2'O-Methyl Cytosine
  modified_base (34)..(38): 2'O-Methyl deoxyuridine
  misc_feature (34)..(38): 2'O-Methyl deoxyuridine linker
  modified_base (39)..(39): 2'O-Methyl Cytosine
  modified_base (40)..(40): gm
  modified_base (41)..(41): 2'O-Methyl Adenosine
  modified_base (42)..(42): 2'O-Methyl Cytosine
  misc_feature (42)..(42): The 2'O-Methyl cytosine is attached  through the linker 1,3-propanediolspacer to 2'O-Methyl cytosine of SEQ ID NO: 337
gcgcggugggaaaugugagauggguugccgcgcuuuuucgac

SEQ ID NO: 203 - RNA, 47 nt, Artificial Sequence
  aptamer
  modified_base (1)..(1): gm
  modified_base (2)..(2): 2'O-Methyl Cytosine
  modified_base (3)..(3): gm
  modified_base (3)..(3): gm
  modified_base (4)..(4): 2'O-Methyl Cytosine
  modified_base (5)..(6): gm
  modified_base (7)..(7): um
  modified_base (8)..(10): 2' Fluoro Guanosine
  modified_base (11)..(13): 2'O-Methyl Adenosine
  modified_base (14)..(14): um
  modified_base (15)..(15): 2' Fluoro Guanosine
  modified_base (16)..(16): um
  modified_base (17)..(17): 2' Fluoro Guanosine
  modified_base (18)..(18): 2'O-Methyl Adenosine
  modified_base (19)..(19): 2' Fluoro Guanosine
  modified_base (20)..(20): 2'O-Methyl Adenosine
  modified_base (21)..(21): um
  modified_base (22)..(24): 2' Fluoro Guanosine
  modified_base (25)..(26): um
  modified_base (27)..(27): gm
  modified_base (28)..(29): 2'O-Methyl Cytosine
  modified_base (30)..(30): gm
  modified_base (31)..(31): 2'O-Methyl Cytosine
  modified_base (32)..(32): gm
  modified_base (33)..(33): 2'O-Methyl Cytosine
  modified_base (34)..(43): 2'O-Methyl deoxyuridine
  misc_feature (34)..(43): 2'O-Methyl deoxyuridine linker
  modified_base (44)..(44): 2'O-Methyl Cytosine
  modified_base (45)..(45): gm
  modified_base (46)..(46): 2'O-Methyl Adenosine
  modified_base (47)..(47): 2'O-Methyl Cytosine
  misc_feature (47)..(47): The 2'O-Methyl cytosine is attached  through the linker 1,3-propanediolspacer to 2'O-Methyl cytosine of SEQ ID NO: 338
gcgcggugggaaaugugagauggguugccgcgcuuuuuuuuuucgac

SEQ ID NO: 204 - RNA, 68 nt, Artificial Sequence
  aptamer
  modified_base (1)..(2): 2'O-Methyl Cytosine
  misc_feature (1)..(1): The 2'O-Methyl cytosine is attached  through the linker 1,3-propanediolspacer to 2'O-Methyl cytosine of another nucleotide sequence XCCXAC
  modified_base (3)..(3): 2' Fluoro Guanosine
  modified_base (4)..(4): 2'O-Methyl Cytosine
  modified_base (5)..(5): 2' Fluoro Guanosine
  modified_base (6)..(6): 2'O-Methyl Cytosine
  modified_base (7)..(8): 2' Fluoro Guanosine
  modified_base (9)..(9): 2'O-Methyl Adenosine
  modified_base (10)..(12): 2' Fluoro Guanosine
  modified_base (13)..(13): gm
  modified_base (14)..(16): um
  modified_base (17)..(17): 2'O-Methyl Cytosine
  modified_base (18)..(18): 2'O-Methyl Adenosine
  modified_base (19)..(19): um
  modified_base (20)..(21): 2'O-Methyl Adenosine
  modified_base (22)..(22): um
  modified_base (23)..(25): 2'O-Methyl Cytosine
  modified_base (26)..(26): 2' Fluoro Guanosine
  modified_base (27)..(29): um
  modified_base (30)..(30): gm
  modified_base (31)..(31): um
  modified_base (32)..(32): 2'O-Methyl Cytosine
  modified_base (33)..(34): gm
  modified_base (35)..(35): 2'O-Methyl Cytosine
  modified_base (36)..(36): gm
  modified_base (37)..(37): 2'O-Methyl Cytosine
  modified_base (38)..(38): gm
  modified_base (39)..(39): 2'O-Methyl Cytosine
  modified_base (40)..(41): gm
  modified_base (42)..(42): um
  modified_base (43)..(45): 2' Fluoro Guanosine
  modified_base (46)..(48): 2'O-Methyl Adenosine
  modified_base (49)..(49): um
  modified_base (50)..(50): 2' Fluoro Guanosine
  modified_base (51)..(51): um
  modified_base (52)..(52): 2' Fluoro Guanosine
  modified_base (53)..(53): 2'O-Methyl Adenosine
  modified_base (54)..(54): 2' Fluoro Guanosine
  modified_base (55)..(55): 2'O-Methyl Adenosine
  modified_base (56)..(56): um
  modified_base (57)..(59): 2' Fluoro Guanosine
  modified_base (60)..(61): um
  modified_base (62)..(62): gm
  modified_base (63)..(64): 2'O-Methyl Cytosine
  modified_base (65)..(65): gm
  modified_base (66)..(66): 2'O-Methyl Cytosine
  modified_base (67)..(67): gm
  modified_base (68)..(68): 2'O-Methyl Cytosine
ccgcgcggagggguuucauaaucccguuugucggcgcgcggugggaaaugugagauggguugccgcgc

SEQ ID NO: 205 - RNA, 35 nt, Artificial Sequence; identical to SEQ ID NO: 67
  aptamer
  modified_base (1)..(2): 2'O-Methyl Cytosine
  misc_feature (1)..(1): The 2'O-Methyl cytosine is attached  through the linker 1,3-propanediolspacer to 2'O-Methyl cytosine of another nucleotide sequence XCCXAC
  modified_base (3)..(3): 2' Fluoro Guanosine
  modified_base (4)..(4): 2'O-Methyl Cytosine
  modified_base (5)..(5): 2' Fluoro Guanosine
  modified_base (6)..(6): 2'O-Methyl Cytosine
  modified_base (7)..(8): 2' Fluoro Guanosine
  modified_base (9)..(9): 2'O-Methyl Adenosine
  modified_base (10)..(12): 2' Fluoro Guanosine
  modified_base (13)..(13): gm
  modified_base (14)..(16): um
  modified_base (17)..(17): 2'O-Methyl Cytosine
  modified_base (18)..(18): 2'O-Methyl Adenosine
  modified_base (19)..(19): um
  modified_base (20)..(21): 2'O-Methyl Adenosine
  modified_base (22)..(22): um
  modified_base (23)..(25): 2'O-Methyl Cytosine
  modified_base (26)..(26): 2' Fluoro Guanosine
  modified_base (27)..(29): um
  modified_base (30)..(30): gm
  modified_base (31)..(31): um
  modified_base (32)..(32): 2'O-Methyl Cytosine
  modified_base (33)..(34): gm
  modified_base (35)..(35): 2'O-Methyl Cytosine
  misc_feature (35)..(35): The 2'O-Methyl cytosine is attached  through the linker 1,3-propanediolspacer to 2'O-Methyl guanosine of SEQ ID NO: 339

SEQ ID NO: 206 - RNA, 35 nt, Artificial Sequence; identical to SEQ ID NO: 67
  aptamer
  modified_base (1)..(2): 2'O-Methyl Cytosine
  misc_feature (1)..(1): The 2'O-Methyl cytosine is attached  through the linker 1,3-propanediolspacer to 2'O-Methyl cytosine of another nucleotide sequence XCCXAC
  modified_base (3)..(3): 2' Fluoro Guanosine
  modified_base (4)..(4): 2'O-Methyl Cytosine
  modified_base (5)..(5): 2' Fluoro Guanosine
  modified_base (6)..(6): 2'O-Methyl Cytosine
  modified_base (7)..(8): 2' Fluoro Guanosine
  modified_base (9)..(9): 2'O-Methyl Adenosine
  modified_base (10)..(12): 2' Fluoro Guanosine
  modified_base (13)..(13): gm
  modified_base (14)..(16): um
  modified_base (17)..(17): 2'O-Methyl Cytosine
  modified_base (18)..(18): 2'O-Methyl Adenosine
  modified_base (19)..(19): um
  modified_base (20)..(21): 2'O-Methyl Adenosine
  modified_base (22)..(22): um
  modified_base (23)..(25): 2'O-Methyl Cytosine
  modified_base (26)..(26): 2' Fluoro Guanosine
  modified_base (27)..(29): um
  modified_base (30)..(30): gm
  modified_base (31)..(31): um
  modified_base (32)..(32): 2'O-Methyl Cytosine
  modified_base (33)..(34): gm
  modified_base (35)..(35): 2'O-Methyl Cytosine
  misc_feature (35)..(35): The 2'O-Methyl cytosine is attached through the linker hexaethylene glycol spacer to 2'O-Methyl guanosine of SEQ ID NO:340

SEQ ID NO: 207 - RNA, 73 nt, Artificial Sequence
  aptamer
  modified_base (1)..(2): 2'O-Methyl Cytosine
  misc_feature (1)..(1): The 2'O-Methyl cytosine is attached  through the linker 1,3-propanediolspacer to 2'O-Methyl cytosine of another nucleotide sequence XCCXAC
  modified_base (3)..(3): 2' Fluoro Guanosine
  modified_base (4)..(4): 2'O-Methyl Cytosine
  modified_base (5)..(5): 2' Fluoro Guanosine
  modified_base (6)..(6): 2'O-Methyl Cytosine
  modified_base (7)..(8): 2' Fluoro Guanosine
  modified_base (9)..(9): 2'O-Methyl Adenosine
  modified_base (10)..(12): 2' Fluoro Guanosine
  modified_base (13)..(13): gm
  modified_base (14)..(16): um
  modified_base (17)..(17): 2'O-Methyl Cytosine
  modified_base (18)..(18): 2'O-Methyl Adenosine
  modified_base (19)..(19): um
  modified_base (20)..(21): 2'O-Methyl Adenosine
  modified_base (22)..(22): um
  modified_base (23)..(25): 2'O-Methyl Cytosine
  modified_base (26)..(26): 2' Fluoro Guanosine
  modified_base (27)..(29): um
  modified_base (30)..(30): gm
  modified_base (31)..(31): um
  modified_base (32)..(32): 2'O-Methyl Cytosine
  modified_base (33)..(34): gm
  modified_base (35)..(35): 2'O-Methyl Cytosine
  modified_base (36)..(40): 2'O-Methyl deoxyuridine
  misc_feature (36)..(40): 2'O-Methyl deoxyuridine linker
  modified_base (41)..(41): gm
  modified_base (42)..(42): 2'O-Methyl Cytosine
  modified_base (43)..(43): gm
  modified_base (44)..(44): 2'O-Methyl Cytosine
  modified_base (45)..(46): gm
  modified_base (47)..(47): um
  modified_base (48)..(50): 2' Fluoro Guanosine
  modified_base (51)..(53): 2'O-Methyl Adenosine
  modified_base (54)..(54): um
  modified_base (55)..(55): 2' Fluoro Guanosine
  modified_base (56)..(56): um
  modified_base (57)..(57): 2' Fluoro Guanosine
  modified_base (58)..(58): 2'O-Methyl Adenosine
  modified_base (59)..(59): 2' Fluoro Guanosine
  modified_base (60)..(60): 2'O-Methyl Adenosine
  modified_base (61)..(61): um
  modified_base (62)..(64): 2' Fluoro Guanosine
  modified_base (65)..(66): um
  modified_base (67)..(67): gm
  modified_base (68)..(69): 2'O-Methyl Cytosine
  modified_base (70)..(70): gm
  modified_base (71)..(71): 2'O-Methyl Cytosine
  modified_base (72)..(72): gm
  modified_base (73)..(73): 2'O-Methyl Cytosine
  modified_base (73)..(73): inverted deoxythymidine incorporated at the 3'  end
ccgcgcggagggguuucauaaucccguuugucggcuuuuugcgcggugggaaaugugagauggguugccgcgc

SEQ ID NO: 208 - RNA, 78 nt, Artificial Sequence
  aptamer
  modified_base (1)..(2): 2'O-Methyl Cytosine
  misc_feature (1)..(1): The 2'O-Methyl cytosine is attached  through the linker 1,3-propanediolspacer to 2'O-Methyl cytosine of another nucleotide sequence XCCXAC
  modified_base (3)..(3): 2' Fluoro Guanosine
  modified_base (4)..(4): 2'O-Methyl Cytosine
  modified_base (5)..(5): 2' Fluoro Guanosine
  modified_base (6)..(6): 2'O-Methyl Cytosine
  modified_base (7)..(8): 2' Fluoro Guanosine
  modified_base (9)..(9): 2'O-Methyl Adenosine
  modified_base (10)..(12): 2' Fluoro Guanosine
  modified_base (13)..(13): gm
  modified_base (14)..(16): um
  modified_base (17)..(17): 2'O-Methyl Cytosine
  modified_base (18)..(18): 2'O-Methyl Adenosine
  modified_base (18)..(18): 2'O-Methyl Adenosine
  modified_base (19)..(19): um
  modified_base (20)..(21): 2'O-Methyl Adenosine
  modified_base (22)..(22): um
  modified_base (23)..(25): 2'O-Methyl Cytosine
  modified_base (26)..(26): 2' Fluoro Guanosine
  modified_base (27)..(29): um
  modified_base (30)..(30): gm
  modified_base (31)..(31): um
  modified_base (32)..(32): 2'O-Methyl Cytosine
  modified_base (33)..(34): gm
  modified_base (35)..(35): 2'O-Methyl Cytosine
  modified_base (36)..(45): 2'O-Methyl deoxyuridine
  misc_feature (36)..(45): 2'O-Methyl deoxyuridine linker
  modified_base (46)..(46): gm
  modified_base (47)..(47): 2'O-Methyl Cytosine
  modified_base (48)..(48): gm
  modified_base (49)..(49): 2'O-Methyl Cytosine
  modified_base (50)..(51): gm
  modified_base (52)..(52): um
  modified_base (53)..(55): 2' Fluoro Guanosine
  modified_base (56)..(58): 2'O-Methyl Adenosine
  modified_base (59)..(59): um
  modified_base (60)..(60): 2' Fluoro Guanosine
  modified_base (61)..(61): um
  modified_base (62)..(62): 2' Fluoro Guanosine
  modified_base (63)..(63): 2'O-Methyl Adenosine
  modified_base (64)..(64): 2' Fluoro Guanosine
  modified_base (65)..(65): 2'O-Methyl Adenosine
  modified_base (66)..(66): um
  modified_base (67)..(69): 2' Fluoro Guanosine
  modified_base (70)..(71): um
  modified_base (72)..(72): gm
  modified_base (73)..(74): 2'O-Methyl Cytosine
  modified_base (75)..(75): gm
  modified_base (76)..(76): 2'O-Methyl Cytosine
  modified_base (77)..(77): gm
  modified_base (78)..(78): 2'O-Methyl Cytosine
  modified_base (78)..(78): inverted deoxythymidine incorporated at the 3'  end
ccgcgcggagggguuucauaaucccguuugucggcuuuuuuuuuugcgcggugggaaaugugagauggguugccgcgc

SEQ ID NO: 209 - RNA, 39 nt, Artificial Sequence
  aptamer
  modified_base (1)..(1): gm
  modified_base (2)..(2): 2'O-Methyl Cytosine
  modified_base (3)..(3): gm
  modified_base (4)..(4): 2'O-Methyl Cytosine
  modified_base (4)..(5): gm
  modified_base (7)..(7): um
  modified_base (8)..(10): 2' Fluoro Guanosine
  modified_base (11)..(13): 2'O-Methyl Adenosine
  modified_base (14)..(14): um
  modified_base (15)..(15): 2' Fluoro Guanosine
  modified_base (16)..(16): um
  modified_base (17)..(17): 2' Fluoro Guanosine
  modified_base (18)..(18): 2'O-Methyl Adenosine
  modified_base (19)..(19): 2' Fluoro Guanosine
  modified_base (20)..(20): 2'O-Methyl Adenosine
  modified_base (21)..(21): um
  modified_base (22)..(24): 2' Fluoro Guanosine
  modified_base (25)..(26): um
  modified_base (27)..(27): gm
  modified_base (28)..(29): 2'O-Methyl Cytosine
  modified_base (30)..(30): gm
  modified_base (31)..(31): 2'O-Methyl Cytosine
  modified_base (32)..(32): gm
  modified_base (33)..(33): 2'O-Methyl Cytosine
  modified_base (34)..(34): gm
  modified_base (35)..(36): 2'O-Methyl Cytosine
  modified_base (37)..(37): gm
  modified_base (38)..(38): 2'O-Methyl Adenosine
  modified_base (39)..(39): 2'O-Methyl Cytosine
  misc_feature (39)..(39): The 2'O-Methyl cytosine is attached  through the linker 1,3-propanediolspacer to 2'O-Methyl cytosine of SEQ ID NO: 341
gcgcggugggaaaugugagauggguugccgcgcgccgac

SEQ ID NO: 210 - RNA, 33 nt, Artificial Sequence; identical to SEQ ID NO: 193
  aptamer
  modified_base (1)..(1): gm
  modified_base (2)..(2): 2'O-Methyl Cytosine
  modified_base (3)..(3): gm
  modified_base (4)..(4): 2'O-Methyl Cytosine
  modified_base (5)..(6): gm
  modified_base (7)..(7): um
  modified_base (8)..(10): 2' Fluoro Guanosine
  modified_base (11)..(13): 2'O-Methyl Adenosine
  modified_base (14)..(14): um
  modified_base (15)..(15): 2' Fluoro Guanosine
  modified_base (16)..(16): um
  modified_base (17)..(17): 2' Fluoro Guanosine
  modified_base (18)..(18): 2'O-Methyl Adenosine
  modified_base (19)..(19): 2' Fluoro Guanosine
  modified_base (20)..(20): 2'O-Methyl Adenosine
  modified_base (21)..(21): um
  modified_base (22)..(24): 2' Fluoro Guanosine
  modified_base (25)..(26): um
  modified_base (27)..(27): gm
  modified_base (28)..(29): 2'O-Methyl Cytosine
  modified_base (30)..(30): gm
  modified_base (31)..(31): 2'O-Methyl Cytosine
  modified_base (32)..(32): gm
  modified_base (33)..(33): 2'O-Methyl Cytosine
  misc_feature (33)..(33): The 2'O-Methyl cytosine is attached  through the linker 1,3-propanediolspacer to 2'O-Methyl guanosine of another nucleotide sequence XCCXAC

SEQ ID NO: 211 - RNA, 33 nt, Artificial Sequence; identical to SEQ ID NO: 193
  aptamer
  modified_base (1)..(1): gm
  modified_base (2)..(2): 2'O-Methyl Cytosine
  modified_base (3)..(3): gm
  modified_base (4)..(4): 2'O-Methyl Cytosine
  modified_base (5)..(6): gm
  modified_base (7)..(7): um
  modified_base (8)..(10): 2' Fluoro Guanosine
  modified_base (11)..(13): 2'O-Methyl Adenosine
  modified_base (14)..(14): um
  modified_base (15)..(15): 2' Fluoro Guanosine
  modified_base (16)..(16): um
  modified_base (17)..(17): 2' Fluoro Guanosine
  modified_base (18)..(18): 2'O-Methyl Adenosine
  modified_base (19)..(19): 2' Fluoro Guanosine
  modified_base (20)..(20): 2'O-Methyl Adenosine
  modified_base (21)..(21): um
  modified_base (22)..(24): 2' Fluoro Guanosine
  modified_base (25)..(26): um
  modified_base (27)..(27): gm
  modified_base (28)..(29): 2'O-Methyl Cytosine
  modified_base (30)..(30): gm
  modified_base (31)..(31): 2'O-Methyl Cytosine
  modified_base (32)..(32): gm
  modified_base (33)..(33): 2'O-Methyl Cytosine
  misc_feature (33)..(33): The 2'O-Methyl cytosine is attached  through the linker Hexaethyleneglycol spacer to 2'O-Methyl guanosine of another nucleotide sequence XCCXAC

SEQ ID NO: 212 - RNA, 44 nt, Artificial Sequence
  aptamer
  modified_base (1)..(1): gm
  modified_base (2)..(2): 2'O-Methyl Cytosine
  modified_base (2)..(2): gm
  modified_base (4)..(4): 2'O-Methyl Cytosine
  modified_base (4)..(5): gm
  modified_base (7)..(7): um
  modified_base (8)..(10): 2' Fluoro Guanosine
  modified_base (11)..(13): 2'O-Methyl Adenosine
  modified_base (14)..(14): um
  modified_base (15)..(15): 2' Fluoro Guanosine
  modified_base (16)..(16): um
  modified_base (17)..(17): 2' Fluoro Guanosine
  modified_base (18)..(18): 2'O-Methyl Adenosine
  modified_base (19)..(19): 2' Fluoro Guanosine
  modified_base (20)..(20): 2'O-Methyl Adenosine
  modified_base (21)..(21): um
  modified_base (22)..(24): 2' Fluoro Guanosine
  modified_base (25)..(26): um
  modified_base (27)..(27): gm
  modified_base (28)..(29): 2'O-Methyl Cytosine
  modified_base (30)..(30): gm
  modified_base (31)..(31): 2'O-Methyl Cytosine
  modified_base (32)..(32): gm
  modified_base (33)..(33): 2'O-Methyl Cytosine
  modified_base (34)..(38): 2'O-Methyl deoxyuridine
  misc_feature (34)..(38): 2'O-Methyl deoxyuridine linker
  modified_base (39)..(39): gm
  modified_base (40)..(41): 2'O-Methyl Cytosine
  modified_base (42)..(42): gm
  modified_base (43)..(43): 2'O-Methyl Adenosine
  modified_base (44)..(44): 2'O-Methyl Cytosine
  misc_feature (44)..(44): The 2'O-Methyl cytosine is attached  through the linker 1,3-propanediolspacer to 2'O-Methyl cytosine of SEQ ID NO: 344
gcgcggugggaaaugugagauggguugccgcgcuuuuugccgac

SEQ ID NO: 213 - RNA, 49 nt, Artificial Sequence
  aptamer
  modified_base (1)..(1): gm
  modified_base (2)..(2): 2'O-Methyl Cytosine
  modified_base (3)..(3): gm
  modified_base (4)..(4): 2'O-Methyl Cytosine
  modified_base (5)..(6): gm
  modified_base (7)..(7): um
  modified_base (8)..(10): 2' Fluoro Guanosine
  modified_base (11)..(13): 2'O-Methyl Adenosine
  modified_base (14)..(14): um
  modified_base (15)..(15): 2' Fluoro Guanosine
  modified_base (16)..(16): um
  modified_base (17)..(17): 2' Fluoro Guanosine
  modified_base (18)..(18): 2'O-Methyl Adenosine
  modified_base (19)..(19): 2' Fluoro Guanosine
  modified_base (20)..(20): 2'O-Methyl Adenosine
  modified_base (21)..(21): um
  modified_base (22)..(24): 2' Fluoro Guanosine
  modified_base (25)..(26): um
  modified_base (27)..(27): gm
  modified_base (28)..(29): 2'O-Methyl Cytosine
  modified_base (30)..(30): gm
  modified_base (31)..(31): 2'O-Methyl Cytosine
  modified_base (32)..(32): gm
  modified_base (33)..(33): 2'O-Methyl Cytosine
  modified_base (34)..(43): 2'O-Methyl deoxyuridine
  misc_feature (34)..(43): 2'O-Methyl deoxyuridine linker
  modified_base (44)..(44): gm
  modified_base (45)..(46): 2'O-Methyl Cytosine
  modified_base (47)..(47): gm
  modified_base (48)..(48): 2'O-Methyl Adenosine
  modified_base (49)..(49): 2'O-Methyl Cytosine
  misc_feature (49)..(49): The 2'O-Methyl cytosine is attached  through the linker 1,3-propanediolspacer to 2'O-Methyl cytosine of SEQ ID NO: 345
gcgcggugggaaaugugagauggguugccgcgcuuuuuuuuuugccgac

SEQ ID NO: 214 - RNA, 36 nt, Artificial Sequence; identical to SEQ ID NO: 9
  aptamer
  modified_base (1)..(1): 2'O-Methyl Cytosine
  modified_base (2)..(2): gm
  modified_base (3)..(3): 2'O-Methyl Adenosine
  modified_base (4)..(4): 2'O-Methyl Cytosine
  modified_base (5)..(5): um
  modified_base (6)..(7): 2'O-Methyl Cytosine
  modified_base (8)..(8): 2' Fluoro Guanosine
  modified_base (9)..(9): 2'O-Methyl Cytosine
  modified_base (10)..(10): 2' Fluoro Guanosine
  modified_base (11)..(11): 2'O-Methyl Cytosine
  modified_base (12)..(13): 2' Fluoro Guanosine
  modified_base (14)..(14): 2'O-Methyl Adenosine
  modified_base (15)..(16): 2' Fluoro Guanosine
  modified_base (17)..(17): 2'O-Methyl Cytosine
  modified_base (18)..(19): um
  modified_base (20)..(20): 2' Fluoro Guanosine
  modified_base (21)..(21): 2'O-Methyl Adenosine
  modified_base (22)..(23): 2' Fluoro Guanosine
  modified_base (24)..(24): um
  modified_base (25)..(25): 2'O-Methyl Adenosine
  modified_base (26)..(26): 2' Fluoro Guanosine
  modified_base (27)..(28): 2'O-Methyl Cytosine
  modified_base (29)..(29): 2' Fluoro Guanosine
  modified_base (30)..(32): um
  modified_base (33)..(33): gm
  modified_base (34)..(34): um
  modified_base (35)..(35): 2'O-Methyl Cytosine
  modified_base (36)..(36): gm
  misc_feature (36)..(36): inverted deoxythymidine incorporated at the 3'  end

SEQ ID NO: 215 - RNA, 36 nt, Artificial Sequence; identical to SEQ ID NO: 9
  aptamer
  modified_base (1)..(1): 2'O-Methyl Cytosine
  modified_base (2)..(2): gm
  modified_base (3)..(3): 2'O-Methyl Adenosine
  modified_base (4)..(4): 2'O-Methyl Cytosine
  modified_base (5)..(5): um
  modified_base (6)..(7): 2'O-Methyl Cytosine
  modified_base (8)..(8): 2' Fluoro Guanosine
  modified_base (9)..(9): 2'O-Methyl Cytosine
  modified_base (10)..(10): 2' Fluoro Guanosine
  modified_base (11)..(11): 2'O-Methyl Cytosine
  modified_base (12)..(13): 2' Fluoro Guanosine
  modified_base (14)..(14): 2'O-Methyl Adenosine
  modified_base (15)..(16): 2' Fluoro Guanosine
  modified_base (17)..(17): 2'O-Methyl Cytosine
  modified_base (18)..(19): um
  modified_base (20)..(20): 2' Fluoro Guanosine
  modified_base (21)..(21): 2'O-Methyl Adenosine
  modified_base (22)..(23): 2' Fluoro Guanosine
  modified_base (24)..(24): um
  modified_base (25)..(25): 2'O-Methyl Adenosine
  modified_base (26)..(26): 2' Fluoro Guanosine
  modified_base (27)..(28): 2'O-Methyl Cytosine
  modified_base (29)..(29): 2' Fluoro Guanosine
  modified_base (30)..(34): um
  modified_base (33)..(33): gm
  modified_base (35)..(35): 2'O-Methyl Cytosine
  modified_base (36)..(36): gm
  misc_feature (36)..(36): The 2'O-Methyl guanosine is attached  through the linker 1,3-propanediolspacer to 2'O-Methyl guanosine of SEQ ID NO: 346

SEQ ID NO: 216 - RNA, 36 nt, Artificial Sequence; identical to SEQ ID NO: 9
  aptamer
  modified_base (1)..(1): 2'O-Methyl Cytosine
  modified_base (2)..(2): gm
  modified_base (3)..(3): 2'O-Methyl Adenosine
  modified_base (4)..(4): 2'O-Methyl Cytosine
  modified_base (5)..(5): um
  modified_base (6)..(7): 2'O-Methyl Cytosine
  modified_base (8)..(8): 2' Fluoro Guanosine
  modified_base (9)..(9): 2'O-Methyl Cytosine
  modified_base (10)..(10): 2' Fluoro Guanosine
  modified_base (11)..(11): 2'O-Methyl Cytosine
  modified_base (12)..(13): 2' Fluoro Guanosine
  modified_base (14)..(14): 2'O-Methyl Adenosine
  modified_base (15)..(16): 2' Fluoro Guanosine
  modified_base (17)..(17): 2'O-Methyl Cytosine
  modified_base (18)..(19): um
  modified_base (20)..(20): 2' Fluoro Guanosine
  modified_base (21)..(21): 2'O-Methyl Adenosine
  modified_base (22)..(23): 2' Fluoro Guanosine
  modified_base (24)..(24): um
  modified_base (25)..(25): 2'O-Methyl Adenosine
  modified_base (26)..(26): 2' Fluoro Guanosine
  modified_base (27)..(28): 2'O-Methyl Cytosine
  modified_base (29)..(29): 2' Fluoro Guanosine
  modified_base (30)..(34): um
  modified_base (33)..(33): gm
  modified_base (35)..(35): 2'O-Methyl Cytosine
  modified_base (36)..(36): gm
  misc_feature (36)..(36): The 2'O-Methyl guanosine is attached through the linker Hexaethyleneglycol spacer to 2'O-Methyl guanosine of  SEQ ID NO: 347

SEQ ID NO: 217 - RNA, 70 nt, Artificial Sequence
  aptamer
  modified_base (1)..(1): 2'O-Methyl Cytosine
  modified_base (2)..(2): gm
  modified_base (3)..(3): 2'O-Methyl Adenosine
  modified_base (4)..(4): 2'O-Methyl Cytosine
  modified_base (5)..(5): um
  modified_base (6)..(7): 2'O-Methyl Cytosine
  modified_base (8)..(8): 2' Fluoro Guanosine
  modified_base (9)..(9): 2'O-Methyl Cytosine
  modified_base (10)..(10): 2' Fluoro Guanosine
  modified_base (11)..(11): 2'O-Methyl Cytosine
  modified_base (12)..(13): 2' Fluoro Guanosine
  modified_base (14)..(14): 2'O-Methyl Adenosine
  modified_base (15)..(16): 2' Fluoro Guanosine
  modified_base (17)..(17): 2'O-Methyl Cytosine
  modified_base (18)..(19): um
  modified_base (20)..(20): 2' Fluoro Guanosine
  modified_base (21)..(21): 2'O-Methyl Adenosine
  modified_base (22)..(23): 2' Fluoro Guanosine
  modified_base (24)..(24): um
  modified_base (25)..(25): 2'O-Methyl Adenosine
  modified_base (26)..(26): 2' Fluoro Guanosine
  modified_base (27)..(28): 2'O-Methyl Cytosine
  modified_base (29)..(29): 2' Fluoro Guanosine
  modified_base (30)..(32): um
  modified_base (33)..(33): gm
  modified_base (34)..(34): um
  modified_base (35)..(35): 2'O-Methyl Cytosine
  modified_base (36)..(36): gm
  modified_base (37)..(41): 2'O-Methyl deoxyuridine
  misc_feature (37)..(41): 2'O-Methyl deoxyuridine linker
  modified_base (42)..(42): gm
  modified_base (43)..(43): 2'O-Methyl Cytosine
  modified_base (44)..(45): gm
  modified_base (46)..(46): um
  modified_base (47)..(49): 2' Fluoro Guanosine
  modified_base (50)..(52): 2'O-Methyl Adenosine
  modified_base (53)..(53): um
  modified_base (54)..(54): 2' Fluoro Guanosine
  modified_base (55)..(55): um
  modified_base (56)..(56): 2' Fluoro Guanosine
  modified_base (57)..(57): 2'O-Methyl Adenosine
  modified_base (58)..(58): 2' Fluoro Guanosine
  modified_base (59)..(59): 2'O-Methyl Adenosine
  modified_base (60)..(60): um
  modified_base (61)..(63): 2' Fluoro Guanosine
  modified_base (64)..(65): um
  modified_base (66)..(66): gm
  modified_base (67)..(68): 2'O-Methyl Cytosine
  modified_base (69)..(69): gm
  modified_base (70)..(70): 2'O-Methyl Cytosine
  misc_feature (70)..(70): inverted deoxythymidine incorporated at the 3'  end
cgacuccgcgcggaggcuugagguagccguuugucguuuuugcggugggaaaugugagauggguugccgc

SEQ ID NO: 218 - RNA, 75 nt, Artificial Sequence
  aptamer
  modified_base (1)..(1): 2'O-Methyl Cytosine
  modified_base (2)..(2): gm
  modified_base (3)..(3): 2'O-Methyl Adenosine
  modified_base (4)..(4): 2'O-Methyl Cytosine
  modified_base (5)..(5): um
  modified_base (6)..(7): 2'O-Methyl Cytosine
  modified_base (8)..(8): 2' Fluoro Guanosine
  modified_base (9)..(9): 2'O-Methyl Cytosine
  modified_base (10)..(10): 2' Fluoro Guanosine
  modified_base (11)..(11): 2'O-Methyl Cytosine
  modified_base (12)..(13): 2' Fluoro Guanosine
  modified_base (14)..(14): 2'O-Methyl Adenosine
  modified_base (15)..(16): 2' Fluoro Guanosine
  modified_base (17)..(17): 2'O-Methyl Cytosine
  modified_base (18)..(19): um
  modified_base (20)..(20): 2' Fluoro Guanosine
  modified_base (21)..(21): 2'O-Methyl Adenosine
  modified_base (22)..(23): 2' Fluoro Guanosine
  modified_base (24)..(24): um
  modified_base (25)..(25): 2'O-Methyl Adenosine
  modified_base (26)..(26): 2' Fluoro Guanosine
  modified_base (27)..(28): 2'O-Methyl Cytosine
  modified_base (29)..(29): 2' Fluoro Guanosine
  modified_base (30)..(34): um
  modified_base (30)..(32): um
  modified_base (33)..(33): gm
  modified_base (34)..(34): um
  modified_base (35)..(35): 2'O-Methyl Cytosine
  modified_base (36)..(36): gm
  modified_base (37)..(46): 2'O-Methyl deoxyuridine
  modified_base (37)..(46): 2'O-Methyl deoxyuridine linker
  modified_base (47)..(47): gm
  modified_base (48)..(48): 2'O-Methyl Cytosine
  modified_base (49)..(50): gm
  modified_base (51)..(51): um
  modified_base (52)..(54): 2' Fluoro Guanosine
  modified_base (55)..(57): 2'O-Methyl Adenosine
  modified_base (58)..(58): um
  modified_base (59)..(59): 2' Fluoro Guanosine
  modified_base (60)..(60): um
  modified_base (61)..(61): 2' Fluoro Guanosine
  modified_base (62)..(62): 2'O-Methyl Adenosine
  modified_base (63)..(63): 2' Fluoro Guanosine
  modified_base (64)..(64): 2'O-Methyl Adenosine
  modified_base (65)..(65): um
  modified_base (66)..(68): 2' Fluoro Guanosine
  modified_base (69)..(70): um
  modified_base (71)..(71): gm
  modified_base (72)..(73): 2'O-Methyl Cytosine
  modified_base (74)..(74): gm
  modified_base (75)..(75): 2'O-Methyl Cytosine
  modified_base (75)..(75): inverted deoxythymidine incorporated at the 3'  end
cgacuccgcgcggaggcuugagguagccguuugucguuuuuuuuuugcggugggaaaugugagauggguugccgc

SEQ ID NO: 219 - RNA, 29 nt, Artificial Sequence
  aptamer
  modified_base (1)..(1): gm
  modified_base (2)..(2): 2'O-Methyl Cytosine
  modified_base (3)..(4): gm
  modified_base (5)..(5): um
  modified_base (6)..(8): 2' Fluoro Guanosine
  modified_base (9)..(11): 2'O-Methyl Adenosine
  modified_base (12)..(12): um
  modified_base (13)..(13): 2' Fluoro Guanosine
  modified_base (14)..(14): um
  modified_base (15)..(15): 2' Fluoro Guanosine
  modified_base (16)..(16): 2'O-Methyl Adenosine
  modified_base (17)..(17): 2' Fluoro Guanosine
  modified_base (18)..(18): 2'O-Methyl Adenosine
  modified_base (19)..(19): um
  modified_base (20)..(22): 2' Fluoro Guanosine
  modified_base (23)..(24): um
  modified_base (25)..(25): gm
  modified_base (26)..(27): 2'O-Methyl Cytosine
  modified_base (28)..(28): gm
  modified_base (29)..(29): 2'O-Methyl Cytosine
  modified_base (29)..(29): inverted deoxythymidine incorporated at the 3'  end
gcggugggaaaugugagauggguugccgc

SEQ ID NO: 220 - RNA, 29 nt, Artificial Sequence
  aptamer
  modified_base (1)..(1): gm
  modified_base (2)..(2): 2'O-Methyl Cytosine
  modified_base (2)..(3): gm
  modified_base (5)..(5): um
  modified_base (6)..(8): 2' Fluoro Guanosine
  modified_base (9)..(11): 2'O-Methyl Adenosine
  modified_base (12)..(12): um
  modified_base (13)..(13): 2' Fluoro Guanosine
  modified_base (14)..(14): um
  modified_base (15)..(15): 2' Fluoro Guanosine
  modified_base (16)..(16): 2'O-Methyl Adenosine
  modified_base (17)..(17): 2' Fluoro Guanosine
  modified_base (18)..(18): 2'O-Methyl Adenosine
  modified_base (19)..(19): um
  modified_base (20)..(22): 2' Fluoro Guanosine
  modified_base (23)..(24): um
  modified_base (25)..(25): gm
  modified_base (26)..(27): 2'O-Methyl Cytosine
  modified_base (28)..(28): gm
  modified_base (29)..(29): 2'O-Methyl Cytosine
  misc_feature (29)..(29): The 2'O-Methyl cytosine is attached  through the linker 1,3-propanediolspacer to 2'O-Methyl cytosine of SEQ ID NO: 348
gcggugggaaaugugagauggguugccgc

SEQ ID NO: 221 - RNA, 70 nt, Artificial Sequence
  aptamer
  modified_base (1)..(1): gm
  modified_base (2)..(2): 2'O-Methyl Cytosine
  modified_base (3)..(4): gm
  modified_base (5)..(5): um
  modified_base (6)..(8): 2' Fluoro Guanosine
  modified_base (9)..(11): 2'O-Methyl Adenosine
  modified_base (12)..(12): um
  modified_base (13)..(13): 2' Fluoro Guanosine
  modified_base (14)..(14): um
  modified_base (15)..(15): 2' Fluoro Guanosine
  modified_base (16)..(16): 2'O-Methyl Adenosine
  modified_base (17)..(17): 2' Fluoro Guanosine
  modified_base (18)..(18): 2'O-Methyl Adenosine
  modified_base (19)..(19): um
  modified_base (20)..(22): 2' Fluoro Guanosine
  modified_base (23)..(24): um
  modified_base (25)..(25): gm
  modified_base (26)..(27): 2'O-Methyl Cytosine
  modified_base (28)..(28): gm
  modified_base (29)..(29): 2'O-Methyl Cytosine
  modified_base (30)..(34): 2'O-Methyl deoxyuridine
  misc_feature (30)..(34): 2'O-Methyl deoxyuridine linker
  misc_feature (30)..(34): 2'O-Methyl deoxyuridine linker
  modified_base (35)..(35): 2'O-Methyl Cytosine
  modified_base (36)..(36): gm
  modified_base (37)..(37): 2'O-Methyl Adenosine
  modified_base (38)..(38): 2'O-Methyl Cytosine
  modified_base (39)..(39): um
  modified_base (40)..(43): 2'O-Methyl Cytosine
  modified_base (42)..(42): 2' Fluoro Guanosine
  modified_base (44)..(44): 2' Fluoro Guanosine
  modified_base (45)..(45): 2'O-Methyl Cytosine
  modified_base (46)..(47): 2' Fluoro Guanosine
  modified_base (48)..(48): 2'O-Methyl Adenosine
  modified_base (49)..(50): 2' Fluoro Guanosine
  modified_base (51)..(51): 2'O-Methyl Cytosine
  modified_base (52)..(53): um
  modified_base (54)..(54): 2' Fluoro Guanosine
  modified_base (55)..(55): 2'O-Methyl Adenosine
  modified_base (56)..(57): 2' Fluoro Guanosine
  modified_base (58)..(58): um
  modified_base (59)..(59): 2'O-Methyl Adenosine
  modified_base (60)..(60): 2' Fluoro Guanosine
  modified_base (61)..(62): 2'O-Methyl Cytosine
  modified_base (63)..(63): 2' Fluoro Guanosine
  modified_base (64)..(67): um
  modified_base (67)..(67): gm
  modified_base (68)..(68): um
  modified_base (69)..(69): 2'O-Methyl Cytosine
  modified_base (70)..(70): gm
  modified_base (70)..(70): inverted deoxythymidine incorporated at the 3'  end
gcggugggaaaugugagauggguugccgcuuuuucgacuccgcgcggaggcuugagguagccguuugucg

SEQ ID NO: 222 - RNA, 75 nt, Artificial Sequence
  aptamer
  modified_base (1)..(1): gm
  modified_base (2)..(2): 2'O-Methyl Cytosine
  modified_base (3)..(4): gm
  modified_base (5)..(5): um
  modified_base (6)..(8): 2' Fluoro Guanosine
  modified_base (9)..(11): 2'O-Methyl Adenosine
  modified_base (12)..(12): um
  modified_base (13)..(13): 2' Fluoro Guanosine
  modified_base (14)..(14): um
  modified_base (15)..(15): 2' Fluoro Guanosine
  modified_base (16)..(16): 2'O-Methyl Adenosine
  modified_base (17)..(17): 2' Fluoro Guanosine
  modified_base (18)..(18): 2'O-Methyl Adenosine
  modified_base (19)..(19): um
  modified_base (20)..(22): 2' Fluoro Guanosine
  modified_base (23)..(24): um
  modified_base (25)..(25): gm
  modified_base (26)..(27): 2'O-Methyl Cytosine
  modified_base (28)..(28): gm
  modified_base (29)..(29): 2'O-Methyl Cytosine
  modified_base (30)..(39): 2'O-Methyl deoxyuridine
  misc_feature (30)..(39): 2'O-Methyl deoxyuridine linker
  modified_base (40)..(40): 2'O-Methyl Cytosine
  modified_base (41)..(41): gm
  modified_base (42)..(42): 2'O-Methyl Adenosine
  modified_base (43)..(43): 2'O-Methyl Cytosine
  modified_base (44)..(44): um
  modified_base (45)..(46): 2'O-Methyl Cytosine
  modified_base (47)..(47): 2' Fluoro Guanosine
  modified_base (48)..(48): 2'O-Methyl Cytosine
  modified_base (49)..(49): 2' Fluoro Guanosine
  modified_base (50)..(50): 2'O-Methyl Cytosine
  modified_base (51)..(52): 2' Fluoro Guanosine
  modified_base (53)..(53): 2'O-Methyl Adenosine
  modified_base (54)..(55): 2' Fluoro Guanosine
  modified_base (56)..(56): 2'O-Methyl Cytosine
  modified_base (57)..(58): um
  modified_base (59)..(59): 2' Fluoro Guanosine
  modified_base (60)..(60): 2'O-Methyl Adenosine
  modified_base (61)..(62): 2' Fluoro Guanosine
  modified_base (63)..(63): um
  modified_base (64)..(64): 2'O-Methyl Adenosine
  modified_base (65)..(65): 2' Fluoro Guanosine
  modified_base (66)..(67): 2'O-Methyl Cytosine
  modified_base (68)..(68): 2' Fluoro Guanosine
  modified_base (69)..(71): um
  modified_base (72)..(72): gm
  modified_base (73)..(73): um
  modified_base (74)..(74): 2'O-Methyl Cytosine
  modified_base (75)..(75): gm
  modified_base (75)..(75): inverted deoxythymidine incorporated at the 3'  end
gcggugggaaaugugagauggguugccgcuuuuuuuuuucgacuccgcgcggaggcuugagguagccguuugucg

SEQ ID NO: 223 - RNA, 65 nt, Artificial Sequence
  aptamer
  modified_base (1)..(1): gm
  modified_base (2)..(2): 2'O-Methyl Cytosine
  modified_base (3)..(4): gm
  modified_base (5)..(5): um
  modified_base (6)..(8): 2' Fluoro Guanosine
  modified_base (9)..(11): 2'O-Methyl Adenosine
  modified_base (12)..(12): um
  modified_base (13)..(13): 2' Fluoro Guanosine
  modified_base (14)..(14): um
  modified_base (15)..(15): 2' Fluoro Guanosine
  modified_base (16)..(16): 2'O-Methyl Adenosine
  modified_base (17)..(17): 2' Fluoro Guanosine
  modified_base (18)..(18): 2'O-Methyl Adenosine
  modified_base (19)..(19): um
  modified_base (20)..(22): 2' Fluoro Guanosine
  modified_base (23)..(24): um
  modified_base (25)..(25): gm
  modified_base (26)..(27): 2'O-Methyl Cytosine
  modified_base (28)..(28): gm
  modified_base (29)..(30): 2'O-Methyl Cytosine
  modified_base (31)..(31): gm
  modified_base (32)..(32): 2'O-Methyl Adenosine
  modified_base (33)..(33): 2'O-Methyl Cytosine
  modified_base (34)..(34): um
  modified_base (35)..(36): 2'O-Methyl Cytosine
  modified_base (37)..(37): 2' Fluoro Guanosine
  modified_base (38)..(38): 2'O-Methyl Cytosine
  modified_base (40)..(40): 2'O-Methyl Cytosine
  modified_base (43)..(43): 2'O-Methyl Adenosine
  modified_base (46)..(46): 2'O-Methyl Cytosine
  modified_base (47)..(48): um
  modified_base (49)..(49): 2' Fluoro Guanosine
  modified_base (50)..(50): 2'O-Methyl Adenosine
  modified_base (51)..(52): 2' Fluoro Guanosine
  modified_base (53)..(53): um
  modified_base (54)..(54): 2'O-Methyl Adenosine
  modified_base (55)..(55): 2' Fluoro Guanosine
  modified_base (56)..(57): 2'O-Methyl Cytosine
  modified_base (58)..(58): 2' Fluoro Guanosine
  modified_base (59)..(61): um
  modified_base (62)..(62): gm
  modified_base (63)..(63): um
  modified_base (64)..(64): 2'O-Methyl Cytosine
  modified_base (65)..(65): gm
  modified_base (65)..(65): inverted deoxythymidine incorporated at the 3'  end
gcggugggaaaugugagauggguugccgccgacuccgcgcggaggcuugagguagccguuugucg

SEQ ID NO: 224 - RNA, 69 nt, Artificial Sequence
  aptamer
  modified_base (1)..(1): gm
  modified_base (2)..(3): 2'O-Methyl Cytosine
  modified_base (4)..(4): gm
  modified_base (5)..(5): 2'O-Methyl Adenosine
  modified_base (6)..(6): 2'O-Methyl Cytosine
  modified_base (7)..(7): um
  modified_base (8)..(9): 2'O-Methyl Cytosine
  modified_base (10)..(10): 2' Fluoro Guanosine
  modified_base (11)..(11): 2'O-Methyl Cytosine
  modified_base (12)..(12): 2' Fluoro Guanosine
  modified_base (13)..(13): 2'O-Methyl Cytosine
  modified_base (14)..(15): 2' Fluoro Guanosine
  modified_base (16)..(16): 2'O-Methyl Adenosine
  modified_base (17)..(18): 2' Fluoro Guanosine
  modified_base (19)..(19): 2'O-Methyl Cytosine
  modified_base (20)..(21): um
  modified_base (22)..(22): 2' Fluoro Guanosine
  modified_base (23)..(23): 2'O-Methyl Adenosine
  modified_base (24)..(25): 2' Fluoro Guanosine
  modified_base (26)..(26): um
  modified_base (27)..(27): 2'O-Methyl Adenosine
  modified_base (28)..(28): 2' Fluoro Guanosine
  modified_base (29)..(30): 2'O-Methyl Cytosine
  modified_base (31)..(31): 2' Fluoro Guanosine
  modified_base (32)..(34): um
  modified_base (35)..(35): gm
  modified_base (36)..(36): um
  modified_base (37)..(37): 2'O-Methyl Cytosine
  modified_base (38)..(39): gm
  modified_base (40)..(40): 2'O-Methyl Cytosine
  modified_base (41)..(41): gm
  modified_base (42)..(42): 2'O-Methyl Cytosine
  modified_base (43)..(44): gm
  modified_base (45)..(45): um
  modified_base (46)..(48): 2' Fluoro Guanosine
  modified_base (49)..(51): 2'O-Methyl Adenosine
  modified_base (52)..(52): um
  modified_base (53)..(53): 2' Fluoro Guanosine
  modified_base (54)..(54): um
  modified_base (55)..(55): 2' Fluoro Guanosine
  modified_base (56)..(56): 2'O-Methyl Adenosine
  modified_base (57)..(57): 2' Fluoro Guanosine
  modified_base (58)..(58): 2'O-Methyl Adenosine
  modified_base (59)..(59): um
  modified_base (60)..(62): 2' Fluoro Guanosine
  modified_base (63)..(64): um
  modified_base (65)..(65): gm
  modified_base (65)..(65): gm
  modified_base (66)..(67): 2'O-Methyl Cytosine
  modified_base (68)..(68): gm
  modified_base (69)..(69): 2'O-Methyl Cytosine
  modified_base (69)..(69): inverted deoxythymidine incorporated at the 3'  end
gccgacuccgcgcggaggcuugagguagccguuugucggcgcggugggaaaugugagauggguugccgc

SEQ ID NO: 225 - RNA, 40 nt, Artificial Sequence; identical to SEQ ID NO: 110
  aptamer
  modified_base (1)..(1): gm
  modified_base (2)..(3): 2'O-Methyl Cytosin
  modified_base (4)..(4): gm
  modified_base (5)..(5): 2'O-Methyl Adenosine
  modified_base (6)..(6): 2'O-Methyl Cytosin
  modified_base (7)..(7): um
  modified_base (8)..(9): 2'O-Methyl Cytosin
  modified_base (10)..(10): 2' Fluoro Guanosine
  modified_base (11)..(11): 2'O-Methyl Cytosin
  modified_base (12)..(12): 2' Fluoro Guanosine
  modified_base (13)..(13): 2'O-Methyl Cytosin
  modified_base (14)..(15): 2' Fluoro Guanosine
  modified_base (16)..(16): 2'O-Methyl Adenosine
  modified_base (17)..(18): 2' Fluoro Guanosine
  modified_base (17)..(18): 2' Fluoro Guanosine
  modified_base (19)..(19): 2'O-Methyl Cytosin
  modified_base (20)..(21): um
  modified_base (22)..(22): 2' Fluoro Guanosine
  modified_base (23)..(23): 2'O-Methyl Adenosine
  modified_base (24)..(25): 2' Fluoro Guanosine
  modified_base (26)..(26): um
  modified_base (27)..(27): 2'O-Methyl Adenosine
  modified_base (28)..(28): 2' Fluoro Guanosine
  modified_base (29)..(30): 2'O-Methyl Cytosin
  modified_base (31)..(31): 2' Fluoro Guanosine
  modified_base (32)..(34): um
  modified_base (35)..(35): gm
  modified_base (36)..(36): um
  modified_base (37)..(37): 2'O-Methyl Cytosin
  modified_base (38)..(39): gm
  modified_base (40)..(40): 2'O-Methyl Cytosin
  misc_feature (40)..(40): The 2'O-Methyl cytosine is attached  through the linker 1,3-propanediolspacer to 2'O-Methyl guanosine of SEQ ID NO: 351

SEQ ID NO: 226 - RNA, 40 nt, Artificial Sequence; identical to SEQ ID NO: 110
  aptamer
  modified_base (1)..(1): gm
  modified_base (2)..(3): 2'O-Methyl Cytosine
  modified_base (4)..(4): gm
  modified_base (5)..(5): 2'O-Methyl Adenosine
  modified_base (6)..(6): 2'O-Methyl Cytosine
  modified_base (8)..(9): 2'O-Methyl Cytosine
  modified_base (10)..(10): 2' Fluoro Guanosine
  modified_base (11)..(11): 2'O-Methyl Cytosine
  modified_base (12)..(12): 2' Fluoro Guanosine
  modified_base (13)..(13): 2'O-Methyl Cytosine
  modified_base (14)..(15): 2' Fluoro Guanosine
  modified_base (16)..(16): 2'O-Methyl Adenosine
  modified_base (17)..(18): 2' Fluoro Guanosine
  modified_base (19)..(19): 2'O-Methyl Cytosine
  modified_base (22)..(22): 2' Fluoro Guanosine
  modified_base (23)..(23): 2'O-Methyl Adenosine
  modified_base (24)..(25): 2' Fluoro Guanosine
  modified_base (27)..(27): 2'O-Methyl Adenosine
  modified_base (28)..(28): 2' Fluoro Guanosine
  modified_base (29)..(30): 2'O-Methyl Cytosine
  modified_base (31)..(31): 2' Fluoro Guanosine
  modified_base (35)..(35): gm
  modified_base (37)..(37): 2'O-Methyl Cytosine
  modified_base (38)..(39): gm
  modified_base (40)..(40): 2'O-Methyl Cytosine
  misc_feature (40)..(40): The 2'O-Methyl cytosine is attached through the linker Hexaethylene glycol spacer to 2'O-Methyl guanosine of SEQ ID NO:352

SEQ ID NO: 227 - RNA, 74 nt, Artificial Sequence
  aptamer
  modified_base (1)..(1): gm
  modified_base (2)..(3): 2'O-Methyl Cytosine
  modified_base (4)..(4): gm
  modified_base (5)..(5): 2'O-Methyl Adenosine
  modified_base (6)..(6): 2'O-Methyl Cytosine
  modified_base (7)..(7): um
  modified_base (8)..(9): 2'O-Methyl Cytosine
  modified_base (10)..(10): 2' Fluoro Guanosine
  modified_base (11)..(11): 2'O-Methyl Cytosine
  modified_base (12)..(12): 2' Fluoro Guanosine
  modified_base (13)..(13): 2'O-Methyl Cytosine
  modified_base (14)..(15): 2' Fluoro Guanosine
  modified_base (16)..(16): 2'O-Methyl Adenosine
  modified_base (17)..(18): 2' Fluoro Guanosine
  modified_base (19)..(19): 2'O-Methyl Cytosine
  modified_base (20)..(21): um
  modified_base (22)..(22): 2' Fluoro Guanosine
  modified_base (23)..(23): 2'O-Methyl Adenosine
  modified_base (24)..(25): 2' Fluoro Guanosine
  modified_base (26)..(26): um
  modified_base (27)..(27): 2'O-Methyl Adenosine
  modified_base (28)..(28): 2' Fluoro Guanosine
  modified_base (29)..(30): 2'O-Methyl Cytosine
  modified_base (31)..(31): 2' Fluoro Guanosine
  modified_base (32)..(34): um
  modified_base (35)..(35): gm
  modified_base (36)..(36): um
  modified_base (37)..(37): 2'O-Methyl Cytosine
  modified_base (38)..(39): gm
  modified_base (40)..(40): 2'O-Methyl Cytosine
  modified_base (41)..(45): 2'O-Methyl deoxyuridine linker
  modified_base (41)..(45): 2'O-Methyl deoxyuridine
  modified_base (46)..(46): gm
  modified_base (47)..(47): 2'O-Methyl Cytosine
  modified_base (48)..(49): gm
  modified_base (50)..(50): um
  modified_base (51)..(53): 2' Fluoro Guanosine
  modified_base (54)..(56): 2'O-Methyl Adenosine
  modified_base (57)..(57): um
  modified_base (58)..(58): 2' Fluoro Guanosine
  modified_base (59)..(59): um
  modified_base (60)..(60): 2' Fluoro Guanosine
  modified_base (61)..(61): 2'O-Methyl Adenosine
  modified_base (62)..(62): 2' Fluoro Guanosine
  modified_base (63)..(63): 2'O-Methyl Adenosine
  modified_base (64)..(64): um
  modified_base (65)..(67): 2' Fluoro Guanosine
  modified_base (68)..(69): um
  modified_base (70)..(70): gm
  modified_base (71)..(72): 2'O-Methyl Cytosine
  modified_base (73)..(73): gm
  modified_base (74)..(74): 2'O-Methyl Cytosine
  modified_base (74)..(74): inverted deoxythymidine incorporated at the 3'  end
gccgacuccgcgcggaggcuugagguagccguuugucggcuuuuugcggugggaaaugugagauggguugccgc

SEQ ID NO: 228 - RNA, 79 nt, Artificial Sequence
  aptamer
  modified_base (1)..(1): gm
  modified_base (2)..(3): 2'O-Methyl Cytosine
  modified_base (4)..(4): gm
  modified_base (5)..(5): 2'O-Methyl Adenosine
  modified_base (6)..(6): 2'O-Methyl Cytosine
  modified_base (7)..(7): um
  modified_base (8)..(9): 2'O-Methyl Cytosine
  modified_base (10)..(10): 2' Fluoro Guanosine
  modified_base (11)..(11): 2'O-Methyl Cytosine
  modified_base (12)..(12): 2' Fluoro Guanosine
  modified_base (13)..(13): 2'O-Methyl Cytosine
  modified_base (14)..(15): 2' Fluoro Guanosine
  modified_base (16)..(16): 2'O-Methyl Adenosine
  modified_base (17)..(18): 2' Fluoro Guanosine
  modified_base (19)..(19): 2'O-Methyl Cytosine
  modified_base (20)..(21): um
  modified_base (22)..(22): 2' Fluoro Guanosine
  modified_base (23)..(23): 2'O-Methyl Adenosine
  modified_base (24)..(25): 2' Fluoro Guanosine
  modified_base (26)..(26): um
  modified_base (27)..(27): 2'O-Methyl Adenosine
  modified_base (28)..(28): 2' Fluoro Guanosine
  modified_base (29)..(30): 2'O-Methyl Cytosine
  modified_base (31)..(31): 2' Fluoro Guanosine
  modified_base (32)..(34): um
  modified_base (35)..(35): gm
  modified_base (36)..(36): um
  modified_base (37)..(37): 2'O-Methyl Cytosine
  modified_base (38)..(39): gm
  modified_base (40)..(40): 2'O-Methyl Cytosine
  modified_base (41)..(50): 2'O-Methyl deoxyuridine
  modified_base (41)..(50): 2'O-Methyl deoxyuridine linker
  modified_base (51)..(51): gm
  modified_base (52)..(52): 2'O-Methyl Cytosine
  modified_base (53)..(54): gm
  modified_base (55)..(55): um
  modified_base (56)..(58): 2' Fluoro Guanosine
  modified_base (59)..(61): 2'O-Methyl Adenosine
  modified_base (62)..(62): um
  modified_base (63)..(63): 2' Fluoro Guanosine
  modified_base (64)..(64): um
  modified_base (65)..(65): 2' Fluoro Guanosine
  modified_base (66)..(66): 2'O-Methyl Adenosine
  modified_base (67)..(67): 2' Fluoro Guanosine
  modified_base (68)..(68): 2'O-Methyl Adenosine
  modified_base (69)..(69): um
  modified_base (70)..(72): 2' Fluoro Guanosine
  modified_base (73)..(74): um
  modified_base (75)..(75): gm
  modified_base (76)..(77): 2'O-Methyl Cytosine
  modified_base (78)..(78): gm
  modified_base (79)..(79): 2'O-Methyl Cytosine
  modified_base (79)..(79): inverted deoxythymidine incorporated at the 3'  end
gccgacuccgcgcggaggcuugagguagccguuugucggcuuuuuuuuuugcggugggaaaugugagauggguugccgc

SEQ ID NO: 229 - RNA, 69 nt, Artificial Sequence
  aptamer
  modified_base (1)..(1): gm
  modified_base (2)..(2): 2'O-Methyl Cytosine
  modified_base (3)..(4): gm
  modified_base (5)..(5): um
  modified_base (6)..(8): 2' Fluoro Guanosine
  modified_base (9)..(11): 2'O-Methyl Adenosine
  modified_base (12)..(12): um
  modified_base (13)..(13): 2' Fluoro Guanosine
  modified_base (14)..(14): um
  modified_base (15)..(15): 2' Fluoro Guanosine
  modified_base (16)..(16): 2'O-Methyl Adenosine
  modified_base (17)..(17): 2' Fluoro Guanosine
  modified_base (18)..(18): 2'O-Methyl Adenosine
  modified_base (19)..(19): um
  modified_base (20)..(22): 2' Fluoro Guanosine
  modified_base (23)..(24): um
  modified_base (25)..(25): gm
  modified_base (26)..(27): 2'O-Methyl Cytosine
  modified_base (28)..(28): gm
  modified_base (29)..(29): 2'O-Methyl Cytosine
  modified_base (30)..(30): gm
  modified_base (31)..(32): 2'O-Methyl Cytosine
  modified_base (33)..(33): gm
  modified_base (34)..(34): 2'O-Methyl Adenosine
  modified_base (35)..(35): 2'O-Methyl Cytosine
  modified_base (36)..(36): um
  modified_base (37)..(38): 2'O-Methyl Cytosine
  modified_base (39)..(39): 2' Fluoro Guanosine
  modified_base (40)..(40): 2'O-Methyl Cytosine
  modified_base (41)..(41): 2' Fluoro Guanosine
  modified_base (42)..(42): 2'O-Methyl Cytosine
  modified_base (43)..(44): 2' Fluoro Guanosine
  modified_base (45)..(45): 2'O-Methyl Adenosine
  modified_base (46)..(47): 2' Fluoro Guanosine
  modified_base (48)..(48): 2'O-Methyl Cytosine
  modified_base (49)..(50): um
  modified_base (51)..(51): 2' Fluoro Guanosine
  modified_base (52)..(52): 2'O-Methyl Adenosine
  modified_base (53)..(54): 2' Fluoro Guanosine
  modified_base (55)..(55): um
  modified_base (56)..(56): 2'O-Methyl Adenosine
  modified_base (57)..(57): 2' Fluoro Guanosine
  modified_base (58)..(59): 2'O-Methyl Cytosine
  modified_base (60)..(60): 2' Fluoro Guanosine
  modified_base (61)..(63): um
  modified_base (64)..(64): gm
  modified_base (65)..(65): um
  modified_base (66)..(66): 2'O-Methyl Cytosine
  modified_base (67)..(68): gm
  modified_base (69)..(69): 2'O-Methyl Cytosine
  modified_base (69)..(69): inverted deoxythymidine incorporated at the 3'  end
gcggugggaaaugugagauggguugccgcgccgacuccgcgcggaggcuugagguagccguuugucggc

SEQ ID NO: 230 - RNA, 29 nt, Artificial Sequence
  aptamer
  modified_base (1)..(1): gm
  modified_base (2)..(2): 2'O-Methyl Cytosine
  modified_base (3)..(4): gm
  modified_base (5)..(5): um
  modified_base (6)..(8): 2' Fluoro Guanosine
  modified_base (9)..(11): 2'O-Methyl Adenosine
  modified_base (12)..(12): um
  modified_base (13)..(13): 2' Fluoro Guanosine
  modified_base (14)..(14): um
  modified_base (15)..(15): 2' Fluoro Guanosine
  modified_base (16)..(16): 2'O-Methyl Adenosine
  modified_base (17)..(17): 2' Fluoro Guanosine
  modified_base (18)..(18): 2'O-Methyl Adenosine
  modified_base (19)..(19): um
  modified_base (20)..(22): 2' Fluoro Guanosine
  modified_base (23)..(24): um
  modified_base (25)..(25): gm
  modified_base (26)..(27): 2'O-Methyl Cytosine
  modified_base (28)..(28): gm
  modified_base (29)..(29): 2'O-Methyl Cytosine
  misc_feature (29)..(29): The 2'O-Methyl cytosine is attached  through the linker 1,3-propanediolspacer to 2'O-Methyl guanosine of SEQ ID NO: 353
gcggugggaaaugugagauggguugccgc

SEQ ID NO: 231 - RNA, 29 nt, Artificial Sequence
  aptamer
  modified_base (1)..(1): gm
  modified_base (2)..(2): 2'O-Methyl Cytosine
  modified_base (3)..(4): gm
  modified_base (5)..(5): um
  modified_base (6)..(8): 2' Fluoro Guanosine
  modified_base (9)..(11): 2'O-Methyl Adenosine
  modified_base (12)..(12): um
  modified_base (13)..(13): 2' Fluoro Guanosine
  modified_base (14)..(14): um
  modified_base (15)..(15): 2' Fluoro Guanosine
  modified_base (16)..(16): 2'O-Methyl Adenosine
  modified_base (17)..(17): 2' Fluoro Guanosine
  modified_base (18)..(18): 2'O-Methyl Adenosine
  modified_base (19)..(19): um
  modified_base (20)..(22): 2' Fluoro Guanosine
  modified_base (23)..(24): um
  modified_base (25)..(25): gm
  modified_base (26)..(27): 2'O-Methyl Cytosine
  modified_base (28)..(28): gm
  modified_base (29)..(29): 2'O-Methyl Cytosine
  misc_feature (29)..(29): The 2'O-Methyl cytosine is attached through the linker Hexaethylene glycol spacer to 2'O-Methyl guanosine of SEQ ID NO:354
gcggugggaaaugugagauggguugccgc

SEQ ID NO: 232 - RNA, 74 nt, Artificial Sequence
  aptamer
  modified_base (1)..(1): gm
  modified_base (3)..(4): gm
  modified_base (5)..(5): um
  modified_base (6)..(8): 2' Fluoro Guanosine
  modified_base (9)..(11): 2'O-Methyl Adenosine
  modified_base (12)..(12): um
  modified_base (13)..(13): 2' Fluoro Guanosine
  modified_base (14)..(14): um
  modified_base (15)..(15): 2' Fluoro Guanosine
  modified_base (16)..(16): 2'O-Methyl Adenosine
  modified_base (17)..(17): 2' Fluoro Guanosine
  modified_base (18)..(18): 2'O-Methyl Adenosine
  modified_base (19)..(19): um
  modified_base (20)..(22): 2' Fluoro Guanosine
  modified_base (23)..(24): um
  modified_base (25)..(25): gm
  modified_base (26)..(27): 2'O-Methyl Cytosine
  modified_base (28)..(28): gm
  modified_base (29)..(29): 2'O-Methyl Cytosine
  modified_base (30)..(34): 2'O-Methyl deoxyuridine
  misc_feature (30)..(34): 2'O-Methyl deoxyuridine linker
  modified_base (35)..(35): gm
  modified_base (36)..(37): 2'O-Methyl Cytosine
  modified_base (38)..(38): gm
  modified_base (39)..(39): 2'O-Methyl Adenosine
  modified_base (40)..(40): 2'O-Methyl Cytosine
  modified_base (41)..(41): um
  modified_base (42)..(43): 2'O-Methyl Cytosine
  modified_base (44)..(44): 2' Fluoro Guanosine
  modified_base (45)..(45): 2'O-Methyl Cytosine
  modified_base (46)..(46): 2' Fluoro Guanosine
  modified_base (47)..(47): 2'O-Methyl Cytosine
  modified_base (48)..(49): 2' Fluoro Guanosine
  modified_base (50)..(50): 2'O-Methyl Adenosine
  modified_base (51)..(52): 2' Fluoro Guanosine
  modified_base (53)..(53): 2'O-Methyl Cytosine
  modified_base (54)..(55): um
  modified_base (56)..(56): 2' Fluoro Guanosine
  modified_base (57)..(57): 2'O-Methyl Adenosine
  modified_base (58)..(59): 2' Fluoro Guanosine
  modified_base (60)..(60): um
  modified_base (61)..(61): 2'O-Methyl Adenosine
  modified_base (62)..(62): 2' Fluoro Guanosine
  modified_base (63)..(64): 2'O-Methyl Cytosine
  modified_base (65)..(65): 2' Fluoro Guanosine
  modified_base (66)..(68): um
  modified_base (69)..(69): gm
  modified_base (70)..(70): um
  modified_base (71)..(71): 2'O-Methyl Cytosine
  modified_base (72)..(73): gm
  modified_base (74)..(74): 2'O-Methyl Cytosine
  modified_base (74)..(74): inverted deoxythymidine incorporated at the 3'  end
gcggugggaaaugugagauggguugccgcuuuuugccgacuccgcgcggaggcuugagguagccguuugucggc

SEQ ID NO: 233 - RNA, 79 nt, Artificial Sequence
  aptamer
  modified_base (1)..(1): gm
  modified_base (2)..(2): 2'O-Methyl Cytosine
  modified_base (3)..(4): gm
  modified_base (5)..(5): um
  modified_base (6)..(8): 2' Fluoro Guanosine
  modified_base (9)..(11): 2'O-Methyl Adenosine
  modified_base (12)..(12): um
  modified_base (13)..(13): 2' Fluoro Guanosine
  modified_base (14)..(14): um
  modified_base (15)..(15): 2' Fluoro Guanosine
  modified_base (16)..(16): 2'O-Methyl Adenosine
  modified_base (17)..(17): 2' Fluoro Guanosine
  modified_base (18)..(18): 2'O-Methyl Adenosine
  modified_base (19)..(19): um
  modified_base (20)..(22): 2' Fluoro Guanosine
  modified_base (23)..(24): um
  modified_base (25)..(25): gm
  modified_base (26)..(27): 2'O-Methyl Cytosine
  modified_base (28)..(28): gm
  modified_base (29)..(29): 2'O-Methyl Cytosine
  misc_feature (30)..(39): 2'O-Methyl deoxyuridine linker
  modified_base (30)..(39): 2'O-Methyl deoxyuridine
  modified_base (40)..(40): gm
  modified_base (41)..(42): 2'O-Methyl Cytosine
  modified_base (43)..(43): gm
  modified_base (44)..(44): 2'O-Methyl Adenosine
  modified_base (45)..(45): 2'O-Methyl Cytosine
  modified_base (46)..(46): um
  modified_base (47)..(48): 2'O-Methyl Cytosine
  modified_base (49)..(49): 2' Fluoro Guanosine
  modified_base (50)..(50): 2'O-Methyl Cytosine
  modified_base (51)..(51): 2' Fluoro Guanosine
  modified_base (52)..(52): 2'O-Methyl Cytosine
  modified_base (53)..(54): 2' Fluoro Guanosine
  modified_base (55)..(55): 2'O-Methyl Adenosine
  modified_base (56)..(57): 2' Fluoro Guanosine
  modified_base (58)..(58): 2'O-Methyl Cytosine
  modified_base (59)..(60): um
  modified_base (61)..(61): 2' Fluoro Guanosine
  modified_base (62)..(62): 2'O-Methyl Adenosine
  modified_base (63)..(64): 2' Fluoro Guanosine
  modified_base (65)..(65): um
  modified_base (66)..(66): 2'O-Methyl Adenosine
  modified_base (67)..(67): 2' Fluoro Guanosine
  modified_base (68)..(69): 2'O-Methyl Cytosine
  modified_base (70)..(70): 2' Fluoro Guanosine
  modified_base (71)..(73): um
  modified_base (74)..(74): gm
  modified_base (75)..(75): um
  modified_base (76)..(76): 2'O-Methyl Cytosine
  modified_base (78)..(79): gm
  modified_base (79)..(79): inverted deoxythymidine incorporated at the 3'  end
  modified_base (79)..(79): 2'O-Methyl Cytosine
gcggugggaaaugugagauggguugccgcuuuuuuuuuugccgacuccgcgcggaggcuugagguagccguuugucggc

SEQ ID NO: 234 - RNA, 69 nt, Artificial Sequence
  aptamer
  modified_base (1)..(1): 2'O-Methyl Cytosine
  modified_base (2)..(2): gm
  modified_base (3)..(3): 2'O-Methyl Adenosine
  modified_base (4)..(4): 2'O-Methyl Cytosine
  modified_base (5)..(5): gm
  modified_base (6)..(7): 2'O-Methyl Cytosine
  modified_base (8)..(8): 2' Fluoro Guanosine
  modified_base (9)..(9): 2'O-Methyl Cytosine
  modified_base (10)..(10): 2' Fluoro Guanosine
  modified_base (11)..(11): 2'O-Methyl Cytosine
  modified_base (12)..(13): 2' Fluoro Guanosine
  modified_base (14)..(14): 2'O-Methyl Adenosine
  modified_base (15)..(16): 2' Fluoro Guanosine
  modified_base (17)..(17): 2'O-Methyl Cytosine
  modified_base (18)..(19): gm
  modified_base (20)..(20): 2' Fluoro Guanosine
  modified_base (21)..(21): 2'O-Methyl Adenosine
  modified_base (22)..(23): 2' Fluoro Guanosine
  modified_base (24)..(24): gm
  modified_base (25)..(25): 2'O-Methyl Adenosine
  modified_base (26)..(26): 2' Fluoro Guanosine
  modified_base (27)..(28): 2'O-Methyl Cytosine
  modified_base (29)..(29): 2' Fluoro Guanosine
  modified_base (30)..(32): gm
  modified_base (33)..(33): gm
  modified_base (34)..(34): gm
  modified_base (35)..(35): 2'O-Methyl Cytosine
  modified_base (36)..(37): gm
  modified_base (38)..(38): 2'O-Methyl Cytosine
  modified_base (39)..(39): gm
  modified_base (40)..(40): 2'O-Methyl Cytosine
  modified_base (41)..(42): gm
  modified_base (43)..(43): gm
  modified_base (44)..(46): 2' Fluoro Guanosine
  modified_base (47)..(49): 2'O-Methyl Adenosine
  modified_base (50)..(50): gm
  modified_base (51)..(51): 2' Fluoro Guanosine
  modified_base (52)..(52): gm
  modified_base (53)..(53): 2' Fluoro Guanosine
  modified_base (54)..(54): 2'O-Methyl Adenosine
  modified_base (55)..(55): 2' Fluoro Guanosine
  modified_base (56)..(56): 2'O-Methyl Adenosine
  modified_base (57)..(57): gm
  modified_base (58)..(60): 2' Fluoro Guanosine
  modified_base (61)..(62): gm
  modified_base (63)..(63): gm
  modified_base (64)..(65): 2'O-Methyl Cytosine
  modified_base (66)..(66): gm
  modified_base (67)..(67): 2'O-Methyl Cytosine
  modified_base (68)..(68): gm
  modified_base (69)..(69): 2'O-Methyl Cytosine
  modified_base (69)..(69): inverted deoxythymidine incorporated at the 3'  end
cgacuccgcgcggaggcuugagguagccguuugucggcgcggugggaaaugugagauggguugccgcgc

SEQ ID NO: 235 - RNA, 36 nt, Artificial Sequence; identical to SEQ ID NO: 9
  aptamer
  modified_base (1)..(1): 2'O-Methyl Cytosine
  modified_base (2)..(2): gm
  modified_base (3)..(3): 2'O-Methyl Adenosine
  modified_base (4)..(4): 2'O-Methyl Cytosine
  modified_base (5)..(5): um
  modified_base (6)..(7): 2'O-Methyl Cytosine
  modified_base (8)..(8): 2' Fluoro Guanosine
  modified_base (9)..(9): 2'O-Methyl Cytosine
  modified_base (10)..(10): 2' Fluoro Guanosine
  modified_base (11)..(11): 2'O-Methyl Cytosine
  modified_base (12)..(13): 2' Fluoro Guanosine
  modified_base (14)..(14): 2'O-Methyl Adenosine
  modified_base (15)..(16): 2' Fluoro Guanosine
  modified_base (17)..(17): 2'O-Methyl Cytosine
  modified_base (18)..(19): um
  modified_base (20)..(20): 2' Fluoro Guanosine
  modified_base (21)..(21): 2'O-Methyl Adenosine
  modified_base (22)..(23): 2' Fluoro Guanosine
  modified_base (24)..(24): um
  modified_base (25)..(25): 2'O-Methyl Adenosine
  modified_base (26)..(26): 2' Fluoro Guanosine
  modified_base (27)..(28): 2'O-Methyl Cytosine
  modified_base (29)..(29): 2' Fluoro Guanosine
  modified_base (29)..(29): gm
  modified_base (30)..(32): um
  modified_base (33)..(33): gm
  modified_base (34)..(34): um
  modified_base (35)..(35): 2'O-Methyl Cytosine
  misc_feature (36)..(36): The 2'O-Methyl guanosine is attached  through the linker 1,3-propanediolspacer to 2'O-Methyl guanosine of SEQ ID NO: 355

SEQ ID NO: 236 - RNA, 36 nt, Artificial Sequence; identical to SEQ ID NO: 9
  aptamer
  modified_base (1)..(1): 2'O-Methyl Cytosine
  modified_base (2)..(2): gm
  modified_base (3)..(3): 2'O-Methyl Adenosine
  modified_base (4)..(4): 2'O-Methyl Cytosine
  modified_base (5)..(5): um
  modified_base (6)..(7): 2'O-Methyl Cytosine
  modified_base (8)..(8): 2'O-Methyl Cytosine
  modified_base (9)..(9): 2'O-Methyl Cytosine
  modified_base (10)..(10): 2'O-Methyl Cytosine
  modified_base (11)..(11): 2'O-Methyl Cytosine
  modified_base (12)..(13): 2'O-Methyl Cytosine
  modified_base (14)..(14): 2'O-Methyl Adenosine
  modified_base (15)..(16): 2'O-Methyl Cytosine
  modified_base (17)..(17): 2'O-Methyl Cytosine
  modified_base (18)..(19): um
  modified_base (20)..(20): 2'O-Methyl Cytosine
  modified_base (21)..(21): 2'O-Methyl Adenosine
  modified_base (22)..(23): 2'O-Methyl Cytosine
  modified_base (24)..(24): um
  modified_base (25)..(25): 2'O-Methyl Adenosine
  modified_base (26)..(26): 2'O-Methyl Cytosine
  modified_base (27)..(28): 2'O-Methyl Cytosine
  modified_base (29)..(29): 2'O-Methyl Cytosine
  modified_base (30)..(32): um
  modified_base (33)..(33): gm
  modified_base (34)..(34): um
  modified_base (35)..(35): 2'O-Methyl Cytosine
  modified_base (36)..(36): gm
  misc_feature (36)..(36): The 2'O-Methyl guanosine is attached through the linker Hexaethylene glycol spacer to 2'O-Methyl guanosine of SEQ ID NO:356

SEQ ID NO: 237 - RNA, 74 nt, Artificial Sequence
  aptamer
  modified_base (1)..(1): 2'O-Methyl Cytosine
  modified_base (2)..(2): gm
  modified_base (3)..(3): 2'O-Methyl Adenosine
  modified_base (4)..(4): 2'O-Methyl Cytosine
  modified_base (5)..(5): um
  modified_base (6)..(7): 2'O-Methyl Cytosine
  modified_base (8)..(8): 2' Fluoro Guanosine
  modified_base (9)..(9): 2'O-Methyl Cytosine
  modified_base (10)..(10): 2' Fluoro Guanosine
  modified_base (11)..(11): 2'O-Methyl Cytosine
  modified_base (12)..(13): 2' Fluoro Guanosine
  modified_base (14)..(14): 2'O-Methyl Adenosine
  modified_base (15)..(16): 2' Fluoro Guanosine
  modified_base (17)..(17): 2'O-Methyl Cytosine
  modified_base (18)..(19): um
  modified_base (20)..(20): 2' Fluoro Guanosine
  modified_base (21)..(21): 2'O-Methyl Adenosine
  modified_base (22)..(23): 2' Fluoro Guanosine
  modified_base (24)..(24): um
  modified_base (25)..(25): 2'O-Methyl Adenosine
  modified_base (26)..(26): 2' Fluoro Guanosine
  modified_base (27)..(28): 2'O-Methyl Cytosine
  modified_base (29)..(29): 2' Fluoro Guanosine
  modified_base (30)..(32): um
  modified_base (33)..(33): gm
  modified_base (34)..(34): um
  modified_base (35)..(35): 2'O-Methyl Cytosine
  modified_base (36)..(36): gm
  modified_base (37)..(41): 2'O-Methyl deoxyuridine
  misc_feature (37)..(41): 2'O-Methyl deoxyuridine linker
  modified_base (42)..(42): gm
  modified_base (43)..(43): 2'O-Methyl Cytosine
  modified_base (44)..(44): gm
  modified_base (45)..(45): 2'O-Methyl Cytosine
  modified_base (46)..(47): gm
  modified_base (48)..(48): um
  modified_base (49)..(51): 2' Fluoro Guanosine
  modified_base (52)..(54): 2'O-Methyl Adenosine
  modified_base (55)..(55): um
  modified_base (56)..(56): 2' Fluoro Guanosine
  modified_base (57)..(57): um
  modified_base (58)..(58): 2' Fluoro Guanosine
  modified_base (59)..(59): 2'O-Methyl Adenosine
  modified_base (60)..(60): 2' Fluoro Guanosine
  modified_base (61)..(61): 2'O-Methyl Adenosine
  modified_base (62)..(62): um
  modified_base (63)..(65): 2' Fluoro Guanosine
  modified_base (66)..(67): um
  modified_base (68)..(68): gm
  modified_base (69)..(70): 2'O-Methyl Cytosine
  modified_base (71)..(71): gm
  modified_base (72)..(72): 2'O-Methyl Cytosine
  modified_base (73)..(73): gm
  modified_base (74)..(74): 2'O-Methyl Cytosine
  modified_base (74)..(74): inverted deoxythymidine incorporated at the 3'  end
cgacuccgcgcggaggcuugagguagccguuugucguuuuugcgcggugggaaaugugagauggguugccgcgc

SEQ ID NO: 238 - RNA, 79 nt, Artificial Sequence
  aptamer
  modified_base (1)..(1): 2'O-Methyl Cytosine
  modified_base (2)..(2): gm
  modified_base (3)..(3): 2'O-Methyl Adenosine
  modified_base (4)..(4): 2'O-Methyl Cytosine
  modified_base (5)..(5): um
  modified_base (6)..(7): 2'O-Methyl Cytosine
  modified_base (8)..(8): 2' Fluoro Guanosine
  modified_base (9)..(9): 2'O-Methyl Cytosine
  modified_base (10)..(10): 2' Fluoro Guanosine
  modified_base (11)..(11): 2'O-Methyl Cytosine
  modified_base (12)..(13): 2' Fluoro Guanosine
  modified_base (14)..(14): 2'O-Methyl Adenosine
  modified_base (15)..(16): 2' Fluoro Guanosine
  modified_base (17)..(17): 2'O-Methyl Cytosine
  modified_base (18)..(19): um
  modified_base (20)..(20): 2' Fluoro Guanosine
  modified_base (21)..(21): 2'O-Methyl Adenosine
  modified_base (22)..(23): 2' Fluoro Guanosine
  modified_base (24)..(24): um
  modified_base (25)..(25): 2'O-Methyl Adenosine
  modified_base (26)..(26): 2' Fluoro Guanosine
  modified_base (27)..(28): 2'O-Methyl Cytosine
  modified_base (29)..(29): 2' Fluoro Guanosine
  modified_base (30)..(32): um
  modified_base (33)..(33): gm
  modified_base (34)..(34): um
  modified_base (35)..(35): 2'O-Methyl Cytosine
  modified_base (36)..(36): gm
  modified_base (37)..(46): 2'O-Methyl deoxyuridine
  misc_feature (37)..(46): 2'O-Methyl deoxyuridine linker
  modified_base (47)..(47): gm
  modified_base (48)..(48): 2'O-Methyl Cytosine
  modified_base (49)..(49): gm
  modified_base (50)..(50): 2'O-Methyl Cytosine
  modified_base (51)..(52): gm
  modified_base (53)..(53): um
  modified_base (54)..(56): 2' Fluoro Guanosine
  modified_base (57)..(59): 2'O-Methyl Adenosine
  modified_base (60)..(60): um
  modified_base (61)..(61): 2' Fluoro Guanosine
  modified_base (62)..(62): um
  modified_base (63)..(63): 2' Fluoro Guanosine
  modified_base (64)..(64): 2'O-Methyl Adenosine
  modified_base (65)..(65): 2' Fluoro Guanosine
  modified_base (66)..(66): 2'O-Methyl Adenosine
  modified_base (67)..(67): um
  modified_base (68)..(70): 2' Fluoro Guanosine
  modified_base (71)..(72): um
  modified_base (73)..(73): gm
  modified_base (74)..(75): 2'O-Methyl Cytosine
  modified_base (76)..(76): gm
  modified_base (77)..(77): 2'O-Methyl Cytosine
  modified_base (78)..(78): gm
  modified_base (79)..(79): 2'O-Methyl Cytosine
  modified_base (79)..(79): inverted deoxythymidine incorporated at the 3'  end
cgacuccgcgcggaggcuugagguagccguuugucguuuuuuuuuugcgcggugggaaaugugagauggguugccgcgc

SEQ ID NO: 239 - RNA, 69 nt, Artificial Sequence; identical to SEQ ID NO: 229
  aptamer
  modified_base (1)..(1): gm
  modified_base (2)..(2): 2'O-Methyl Cytosine
  modified_base (3)..(4): gm
  modified_base (5)..(5): um
  modified_base (6)..(8): 2' Fluoro Guanosine
  modified_base (9)..(11): 2'O-Methyl Adenosine
  modified_base (12)..(12): um
  modified_base (13)..(13): 2' Fluoro Guanosine
  modified_base (14)..(14): um
  modified_base (15)..(15): 2' Fluoro Guanosine
  modified_base (16)..(16): 2'O-Methyl Adenosine
  modified_base (17)..(17): 2' Fluoro Guanosine
  modified_base (18)..(18): 2'O-Methyl Adenosine
  modified_base (19)..(19): um
  modified_base (20)..(22): 2' Fluoro Guanosine
  modified_base (23)..(24): um
  modified_base (25)..(25): gm
  modified_base (26)..(27): 2'O-Methyl Cytosine
  modified_base (28)..(28): gm
  modified_base (29)..(29): 2'O-Methyl Cytosine
  modified_base (30)..(30): gm
  modified_base (31)..(32): 2'O-Methyl Cytosine
  modified_base (33)..(33): gm
  modified_base (34)..(34): 2'O-Methyl Adenosine
  modified_base (35)..(35): 2'O-Methyl Cytosine
  modified_base (36)..(36): um
  modified_base (37)..(38): 2'O-Methyl Cytosine
  modified_base (39)..(39): 2' Fluoro Guanosine
  modified_base (40)..(40): 2'O-Methyl Cytosine
  modified_base (41)..(41): 2' Fluoro Guanosine
  modified_base (42)..(42): 2'O-Methyl Cytosine
  modified_base (43)..(44): 2' Fluoro Guanosine
  modified_base (45)..(45): 2'O-Methyl Adenosine
  modified_base (46)..(47): 2' Fluoro Guanosine
  modified_base (48)..(48): 2'O-Methyl Cytosine
  modified_base (49)..(50): um
  modified_base (51)..(51): 2' Fluoro Guanosine
  modified_base (52)..(52): 2'O-Methyl Adenosine
  modified_base (53)..(54): 2' Fluoro Guanosine
  modified_base (55)..(55): um
  modified_base (56)..(56): 2'O-Methyl Adenosine
  modified_base (57)..(57): 2' Fluoro Guanosine
  modified_base (58)..(59): 2'O-Methyl Cytosine
  modified_base (60)..(60): 2' Fluoro Guanosine
  modified_base (61)..(63): um
  modified_base (64)..(64): gm
  modified_base (65)..(65): um
  modified_base (66)..(66): 2'O-Methyl Cytosine
  modified_base (67)..(68): gm
  modified_base (69)..(69): 2'O-Methyl Cytosine
  modified_base (69)..(69): inverted deoxythymidine incorporated at the 3'  end

SEQ ID NO: 240 - RNA, 29 nt, Artificial Sequence
  aptamer
  modified_base (1)..(1): gm
  modified_base (2)..(2): 2'O-Methyl Cytosine
  modified_base (3)..(4): gm
  modified_base (5)..(5): um
  modified_base (6)..(8): 2' Fluoro Guanosine
  modified_base (9)..(11): 2'O-Methyl Adenosine
  modified_base (12)..(12): um
  modified_base (13)..(13): 2' Fluoro Guanosine
  modified_base (14)..(14): um
  modified_base (15)..(15): 2' Fluoro Guanosine
  modified_base (16)..(16): 2'O-Methyl Adenosine
  modified_base (17)..(17): 2' Fluoro Guanosine
  modified_base (18)..(18): 2'O-Methyl Adenosine
  modified_base (19)..(19): um
  modified_base (20)..(22): 2' Fluoro Guanosine
  modified_base (23)..(24): um
  modified_base (25)..(25): gm
  modified_base (26)..(27): 2'O-Methyl Cytosine
  modified_base (28)..(28): gm
  modified_base (29)..(29): 2'O-Methyl Cytosine
  misc_feature (29)..(29): The 2'O-Methyl cytosine is attached  through the linker 1,3-propanediolspacer to 2'O-Methyl guanosine of SEQ ID NO: 357
gcggugggaaaugugagauggguugccgc

SEQ ID NO: 241 - RNA, 29 nt, Artificial Sequence
  aptamer
  modified_base (1)..(1): gm
  modified_base (2)..(2): 2'O-Methyl Cytosine
  modified_base (3)..(4): gm
  modified_base (5)..(5): um
  modified_base (6)..(8): 2' Fluoro Guanosine
  modified_base (9)..(11): 2'O-Methyl Adenosine
  modified_base (12)..(12): um
  modified_base (13)..(13): 2' Fluoro Guanosine
  modified_base (14)..(14): um
  modified_base (15)..(15): 2' Fluoro Guanosine
  modified_base (16)..(16): 2'O-Methyl Adenosine
  modified_base (17)..(17): 2' Fluoro Guanosine
  modified_base (18)..(18): 2'O-Methyl Adenosine
  modified_base (19)..(19): um
  modified_base (20)..(22): 2' Fluoro Guanosine
  modified_base (23)..(24): um
  modified_base (25)..(25): gm
  modified_base (26)..(27): 2'O-Methyl Cytosine
  modified_base (28)..(28): gm
  modified_base (29)..(29): 2'O-Methyl Cytosine
  misc_feature (29)..(29): The 2'O-Methyl cytosine is attached through the linker Hexaethylene glycol spacer to 2'O-Methyl guanosine of SEQ ID NO:358
gcggugggaaaugugagauggguugccgc

SEQ ID NO: 242 - RNA, 74 nt, Artificial Sequence; identical to SEQ ID NO: 232
  aptamer
  modified_base (1)..(1): gm
  modified_base (2)..(2): 2'O-Methyl Cytosine
  modified_base (3)..(4): gm
  modified_base (5)..(5): um
  modified_base (6)..(8): 2' Fluoro Guanosine
  modified_base (9)..(11): 2'O-Methyl Adenosine
  modified_base (12)..(12): um
  modified_base (13)..(13): 2' Fluoro Guanosine
  modified_base (14)..(14): um
  modified_base (15)..(15): 2' Fluoro Guanosine
  modified_base (16)..(16): 2'O-Methyl Adenosine
  modified_base (17)..(17): 2' Fluoro Guanosine
  modified_base (18)..(18): 2'O-Methyl Adenosine
  modified_base (19)..(19): um
  modified_base (20)..(22): 2' Fluoro Guanosine
  modified_base (23)..(24): um
  modified_base (25)..(25): gm
  modified_base (26)..(27): 2'O-Methyl Cytosine
  modified_base (28)..(28): gm
  modified_base (29)..(29): 2'O-Methyl Cytosine
  modified_base (30)..(34): 2'O-Methyl deoxyuridine
  misc_feature (30)..(34): 2'O-Methyl deoxyuridine linker
  modified_base (35)..(35): gm
  modified_base (36)..(37): 2'O-Methyl Cytosine
  modified_base (38)..(38): gm
  modified_base (39)..(39): 2'O-Methyl Adenosine
  modified_base (40)..(40): 2'O-Methyl Cytosine
  modified_base (41)..(41): um
  modified_base (42)..(43): 2'O-Methyl Cytosine
  modified_base (44)..(44): 2' Fluoro Guanosine
  modified_base (45)..(45): 2'O-Methyl Cytosine
  modified_base (46)..(46): 2' Fluoro Guanosine
  modified_base (47)..(47): 2'O-Methyl Cytosine
  modified_base (48)..(49): 2' Fluoro Guanosine
  modified_base (50)..(50): 2'O-Methyl Adenosine
  modified_base (51)..(52): 2' Fluoro Guanosine
  modified_base (53)..(53): 2'O-Methyl Cytosine
  modified_base (54)..(55): um
  modified_base (56)..(56): 2' Fluoro Guanosine
  modified_base (57)..(57): 2'O-Methyl Adenosine
  modified_base (58)..(59): 2' Fluoro Guanosine
  modified_base (60)..(60): um
  modified_base (61)..(61): 2'O-Methyl Adenosine
  modified_base (62)..(62): 2' Fluoro Guanosine
  modified_base (63)..(64): 2'O-Methyl Cytosine
  modified_base (65)..(65): 2' Fluoro Guanosine
  modified_base (66)..(68): um
  modified_base (69)..(69): gm
  modified_base (70)..(70): um
  modified_base (71)..(71): 2'O-Methyl Cytosine
  modified_base (72)..(73): gm
  modified_base (74)..(74): 2'O-Methyl Cytosine
  modified_base (74)..(74): inverted deoxythymidine incorporated at the 3'  end

SEQ ID NO: 243 - RNA, 79 nt, Artificial Sequence; identical to SEQ ID NO: 233
  aptamer
  modified_base (1)..(1): gm
  modified_base (2)..(2): 2'O-Methyl Cytosine
  modified_base (3)..(4): gm
  modified_base (5)..(5): um
  modified_base (6)..(8): 2' Fluoro Guanosine
  modified_base (9)..(11): 2'O-Methyl Adenosine
  modified_base (12)..(12): um
  modified_base (13)..(13): 2' Fluoro Guanosine
  modified_base (14)..(14): um
  modified_base (15)..(15): 2' Fluoro Guanosine
  modified_base (16)..(16): 2'O-Methyl Adenosine
  modified_base (17)..(17): 2' Fluoro Guanosine
  modified_base (18)..(18): 2'O-Methyl Adenosine
  modified_base (19)..(19): um
  modified_base (20)..(22): 2' Fluoro Guanosine
  modified_base (23)..(24): um
  modified_base (25)..(25): gm
  modified_base (26)..(27): 2'O-Methyl Cytosine
  modified_base (28)..(28): gm
  modified_base (29)..(29): 2'O-Methyl Cytosine
  modified_base (30)..(39): 2'O-Methyl deoxyuridine
  misc_feature (30)..(39): 2'O-Methyl deoxyuridine linker
  modified_base (40)..(40): gm
  modified_base (41)..(42): 2'O-Methyl Cytosine
  modified_base (43)..(43): gm
  modified_base (44)..(44): 2'O-Methyl Adenosine
  modified_base (46)..(46): um
  modified_base (47)..(48): 2'O-Methyl Cytosine
  modified_base (49)..(49): 2' Fluoro Guanosine
  modified_base (50)..(50): 2'O-Methyl Cytosine
  modified_base (51)..(51): 2' Fluoro Guanosine
  modified_base (52)..(52): 2'O-Methyl Cytosine
  modified_base (53)..(54): 2' Fluoro Guanosine
  modified_base (55)..(55): 2'O-Methyl Adenosine
  modified_base (56)..(57): 2' Fluoro Guanosine
  modified_base (58)..(58): 2'O-Methyl Cytosine
  modified_base (59)..(60): um
  modified_base (61)..(61): 2' Fluoro Guanosine
  modified_base (62)..(62): 2'O-Methyl Adenosine
  modified_base (63)..(64): 2' Fluoro Guanosine
  modified_base (65)..(65): um
  modified_base (66)..(66): 2'O-Methyl Adenosine
  modified_base (67)..(67): 2' Fluoro Guanosine
  modified_base (68)..(69): 2'O-Methyl Cytosine
  modified_base (70)..(70): 2' Fluoro Guanosine
  modified_base (71)..(73): um
  modified_base (74)..(74): gm
  modified_base (75)..(75): um
  modified_base (76)..(76): 2'O-Methyl Cytosine
  modified_base (77)..(78): gm
  modified_base (79)..(79): 2'O-Methyl Cytosine
  modified_base (79)..(79): inverted deoxythymidine incorporated at the 3'  end

SEQ ID NO: 244 - RNA, 73 nt, Artificial Sequence
  aptamer
  modified_base (1)..(1): gm
  modified_base (2)..(3): 2'O-Methyl Cytosine
  modified_base (4)..(4): gm
  modified_base (5)..(5): 2'O-Methyl Adenosine
  modified_base (6)..(6): 2'O-Methyl Cytosine
  modified_base (7)..(7): um
  modified_base (8)..(9): 2'O-Methyl Cytosine
  modified_base (10)..(10): 2' Fluoro Guanosine
  modified_base (11)..(11): 2'O-Methyl Cytosine
  modified_base (12)..(12): 2' Fluoro Guanosine
  modified_base (13)..(13): 2'O-Methyl Cytosine
  modified_base (14)..(15): 2' Fluoro Guanosine
  modified_base (16)..(16): 2'O-Methyl Adenosine
  modified_base (17)..(18): 2' Fluoro Guanosine
  modified_base (19)..(19): 2'O-Methyl Cytosine
  modified_base (20)..(21): um
  modified_base (22)..(22): 2' Fluoro Guanosine
  modified_base (23)..(23): 2'O-Methyl Adenosine
  modified_base (24)..(25): 2' Fluoro Guanosine
  modified_base (26)..(26): um
  modified_base (27)..(27): 2'O-Methyl Adenosine
  modified_base (28)..(28): 2' Fluoro Guanosine
  modified_base (29)..(30): 2'O-Methyl Cytosine
  modified_base (31)..(31): 2' Fluoro Guanosine
  modified_base (32)..(36): um
  modified_base (35)..(35): gm
  modified_base (37)..(37): 2'O-Methyl Cytosine
  modified_base (38)..(39): gm
  modified_base (40)..(40): 2'O-Methyl Cytosine
  modified_base (41)..(41): gm
  modified_base (42)..(42): 2'O-Methyl Cytosine
  modified_base (43)..(43): gm
  modified_base (44)..(44): 2'O-Methyl Cytosine
  modified_base (45)..(46): gm
  modified_base (47)..(47): um
  modified_base (48)..(50): 2' Fluoro Guanosine
  modified_base (51)..(53): 2'O-Methyl Adenosine
  modified_base (54)..(54): um
  modified_base (55)..(55): 2' Fluoro Guanosine
  modified_base (56)..(56): um
  modified_base (57)..(57): 2' Fluoro Guanosine
  modified_base (58)..(58): 2'O-Methyl Adenosine
  modified_base (59)..(59): 2' Fluoro Guanosine
  modified_base (60)..(60): 2'O-Methyl Adenosine
  modified_base (61)..(61): um
  modified_base (62)..(64): 2' Fluoro Guanosine
  modified_base (65)..(66): um
  modified_base (67)..(67): gm
  modified_base (68)..(69): 2'O-Methyl Cytosine
  modified_base (70)..(70): gm
  modified_base (71)..(71): 2'O-Methyl Cytosine
  modified_base (72)..(72): gm
  modified_base (73)..(73): 2'O-Methyl Cytosine
  modified_base (73)..(73): inverted deoxythymidine incorporated at the 3'  end
gccgacuccgcgcggaggcuugagguagccguuugucggcgcgcggugggaaaugugagauggguugccgcgc

SEQ ID NO: 245 - RNA, 40 nt, Artificial Sequence; identical to SEQ ID NO: 110
  aptamer
  modified_base (1)..(1): gm
  modified_base (2)..(3): 2'O-Methyl Cytosine
  modified_base (4)..(4): gm
  modified_base (5)..(5): 2'O-Methyl Adenosine
  modified_base (6)..(6): 2'O-Methyl Cytosine
  modified_base (7)..(7): um
  modified_base (8)..(9): 2'O-Methyl Cytosine
  modified_base (10)..(10): 2' Fluoro Guanosine
  modified_base (11)..(11): 2'O-Methyl Cytosine
  modified_base (12)..(12): 2' Fluoro Guanosine
  modified_base (13)..(13): 2'O-Methyl Cytosine
  modified_base (14)..(15): 2' Fluoro Guanosine
  modified_base (16)..(16): 2'O-Methyl Adenosine
  modified_base (17)..(18): 2' Fluoro Guanosine
  modified_base (19)..(19): 2'O-Methyl Cytosine
  modified_base (20)..(21): um
  modified_base (22)..(22): 2' Fluoro Guanosine
  modified_base (23)..(23): 2'O-Methyl Adenosine
  modified_base (24)..(25): 2' Fluoro Guanosine
  modified_base (26)..(26): um
  modified_base (27)..(27): 2'O-Methyl Adenosine
  modified_base (28)..(28): 2' Fluoro Guanosine
  modified_base (29)..(30): 2'O-Methyl Cytosine
  modified_base (31)..(31): 2' Fluoro Guanosine
  modified_base (32)..(34): um
  modified_base (35)..(35): gm
  modified_base (36)..(36): um
  modified_base (37)..(37): 2'O-Methyl Cytosine
  modified_base (38)..(39): gm
  modified_base (40)..(40): 2'O-Methyl Cytosine
  misc_feature (40)..(40): The 2'O-Methyl cytosine is attached through the linker 1,3-propanediolspacer to 2'O-Methyl Guanosine of SEQ ID NO:359

SEQ ID NO: 246 - RNA, 40 nt, Artificial Sequence; identical to SEQ ID NO: 110
  aptamer
  modified_base (1)..(1): gm
  modified_base (2)..(3): 2'O-Methyl Adenosine
  modified_base (4)..(4): gm
  modified_base (5)..(5): 2'O-Methyl Adenosine
  modified_base (6)..(6): 2'O-Methyl Adenosine
  modified_base (7)..(7): um
  modified_base (8)..(9): 2'O-Methyl Adenosine
  modified_base (10)..(10): 2' Fluoro Guanosine
  modified_base (11)..(11): 2'O-Methyl Adenosine
  modified_base (12)..(12): 2' Fluoro Guanosine
  modified_base (13)..(13): 2'O-Methyl Adenosine
  modified_base (14)..(15): 2' Fluoro Guanosine
  modified_base (16)..(16): 2'O-Methyl Adenosine
  modified_base (17)..(18): 2' Fluoro Guanosine
  modified_base (19)..(19): 2'O-Methyl Adenosine
  modified_base (20)..(21): um
  modified_base (22)..(22): 2' Fluoro Guanosine
  modified_base (23)..(23): 2'O-Methyl Adenosine
  modified_base (24)..(25): 2' Fluoro Guanosine
  modified_base (26)..(26): um
  modified_base (27)..(27): 2'O-Methyl Adenosine
  modified_base (28)..(28): 2' Fluoro Guanosine
  modified_base (29)..(30): 2'O-Methyl Adenosine
  modified_base (31)..(31): 2' Fluoro Guanosine
  modified_base (32)..(34): um
  modified_base (35)..(35): gm
  modified_base (36)..(36): um
  modified_base (37)..(37): 2'O-Methyl Adenosine
  modified_base (38)..(39): gm
  modified_base (40)..(40): 2'O-Methyl Adenosine
  misc_feature (40)..(40): The 2'O-Methyl cytosine is attached through the linker hexaethylene glycol spacer to  2'O-Methyl Guanosine of SEQ ID:360

SEQ ID NO: 247 - RNA, 78 nt, Artificial Sequence
  aptamer
  modified_base (1)..(1): gm
  modified_base (2)..(3): 2'O-Methyl Cytosine
  modified_base (4)..(4): gm
  modified_base (5)..(5): 2'O-Methyl Adenosine
  modified_base (6)..(6): 2'O-Methyl Cytosine
  modified_base (7)..(7): um
  modified_base (7)..(7): um
  modified_base (8)..(9): 2'O-Methyl Cytosine
  modified_base (10)..(10): 2' Fluoro Guanosine
  modified_base (11)..(11): 2'O-Methyl Cytosine
  modified_base (12)..(12): 2' Fluoro Guanosine
  modified_base (13)..(13): 2'O-Methyl Cytosine
  modified_base (14)..(15): 2' Fluoro Guanosine
  modified_base (16)..(16): 2'O-Methyl Adenosine
  modified_base (17)..(18): 2' Fluoro Guanosine
  modified_base (19)..(19): 2'O-Methyl Cytosine
  modified_base (20)..(21): um
  modified_base (22)..(22): 2' Fluoro Guanosine
  modified_base (23)..(23): 2'O-Methyl Adenosine
  modified_base (24)..(25): 2' Fluoro Guanosine
  modified_base (26)..(26): um
  modified_base (27)..(27): 2'O-Methyl Adenosine
  modified_base (28)..(28): 2' Fluoro Guanosine
  modified_base (29)..(30): 2'O-Methyl Cytosine
  modified_base (31)..(31): 2' Fluoro Guanosine
  modified_base (32)..(34): um
  modified_base (35)..(35): gm
  modified_base (36)..(36): um
  modified_base (37)..(37): 2'O-Methyl Cytosine
  modified_base (38)..(39): gm
  modified_base (40)..(40): 2'O-Methyl Cytosine
  modified_base (41)..(45): 2'O-Methyl deoxyuridine
  misc_feature (41)..(45): 2'O-Methyl deoxyuridine linker
  modified_base (46)..(46): gm
  modified_base (47)..(47): 2'O-Methyl Cytosine
  modified_base (48)..(48): gm
  modified_base (49)..(49): 2'O-Methyl Cytosine
  modified_base (51)..(51): gm
  modified_base (52)..(52): um
  modified_base (53)..(54): gm
  modified_base (53)..(55): 2' Fluoro Guanosine
  modified_base (56)..(58): 2'O-Methyl Adenosine
  modified_base (59)..(59): um
  modified_base (60)..(60): 2' Fluoro Guanosine
  modified_base (61)..(61): um
  modified_base (62)..(62): 2' Fluoro Guanosine
  modified_base (63)..(63): 2'O-Methyl Adenosine
  modified_base (64)..(64): 2' Fluoro Guanosine
  modified_base (65)..(65): 2'O-Methyl Adenosine
  modified_base (66)..(66): um
  modified_base (67)..(69): 2' Fluoro Guanosine
  modified_base (70)..(71): um
  modified_base (72)..(72): gm
  modified_base (73)..(74): 2'O-Methyl Cytosine
  modified_base (75)..(75): gm
  modified_base (76)..(76): 2'O-Methyl Cytosine
  modified_base (77)..(77): gm
  modified_base (78)..(78): 2'O-Methyl Cytosine
  modified_base (78)..(78): inverted deoxythymidine incorporated at the 3'  end
gccgacuccgcgcggaggcuugagguagccguuugucggcuuuuugcgcggugggaaaugugagauggguugccgcgc

SEQ ID NO: 248 - RNA, 83 nt, Artificial Sequence
  aptamer
  modified_base (1)..(1): gm
  modified_base (2)..(3): 2'O-Methyl Cytosine
  modified_base (4)..(4): gm
  modified_base (5)..(5): 2'O-Methyl Adenosine
  modified_base (6)..(6): 2'O-Methyl Cytosine
  modified_base (7)..(7): um
  modified_base (8)..(9): 2'O-Methyl Cytosine
  modified_base (10)..(10): 2' Fluoro Guanosine
  modified_base (11)..(11): 2'O-Methyl Cytosine
  modified_base (12)..(12): 2' Fluoro Guanosine
  modified_base (13)..(13): 2'O-Methyl Cytosine
  modified_base (14)..(15): 2' Fluoro Guanosine
  modified_base (16)..(16): 2'O-Methyl Adenosine
  modified_base (17)..(18): 2' Fluoro Guanosine
  modified_base (19)..(19): 2'O-Methyl Cytosine
  modified_base (20)..(21): um
  modified_base (22)..(22): 2' Fluoro Guanosine
  modified_base (23)..(23): 2'O-Methyl Adenosine
  modified_base (24)..(25): 2' Fluoro Guanosine
  modified_base (26)..(26): um
  modified_base (27)..(27): 2'O-Methyl Adenosine
  modified_base (28)..(28): 2' Fluoro Guanosine
  modified_base (29)..(30): 2'O-Methyl Cytosine
  modified_base (31)..(31): 2' Fluoro Guanosine
  modified_base (32)..(34): um
  modified_base (35)..(35): gm
  modified_base (36)..(36): um
  modified_base (37)..(37): 2'O-Methyl Cytosine
  modified_base (38)..(39): gm
  modified_base (40)..(40): 2'O-Methyl Cytosine
  modified_base (41)..(50): 2'O-Methyl deoxyuridine
  misc_feature (41)..(50): 2'O-Methyl deoxyuridine linker
  modified_base (51)..(51): gm
  modified_base (52)..(52): 2'O-Methyl Cytosine
  modified_base (53)..(53): gm
  modified_base (54)..(54): 2'O-Methyl Cytosine
  modified_base (55)..(56): gm
  modified_base (57)..(57): um
  modified_base (58)..(60): 2' Fluoro Guanosine
  modified_base (61)..(63): 2'O-Methyl Adenosine
  modified_base (64)..(64): um
  modified_base (65)..(65): 2' Fluoro Guanosine
  modified_base (66)..(66): um
  modified_base (67)..(67): 2' Fluoro Guanosine
  modified_base (68)..(68): 2'O-Methyl Adenosine
  modified_base (69)..(69): 2' Fluoro Guanosine
  modified_base (70)..(70): 2'O-Methyl Adenosine
  modified_base (71)..(71): um
  modified_base (72)..(74): 2' Fluoro Guanosine
  modified_base (75)..(76): um
  modified_base (77)..(77): gm
  modified_base (78)..(79): 2'O-Methyl Cytosine
  modified_base (80)..(80): gm
  modified_base (81)..(81): 2'O-Methyl Cytosine
  modified_base (82)..(82): gm
  modified_base (83)..(83): 2'O-Methyl Cytosine
  modified_base (83)..(83): inverted deoxythymidine incorporated at the 3'  end
gccgacuccgcgcggaggcuugagguagccguuugucggcuuuuuuuuuugcgcggugggaaaugugagauggguugccgcgc

SEQ ID NO: 249 - RNA, 73 nt, Artificial Sequence
  aptamer
  modified_base (1)..(1): gm
  modified_base (2)..(2): 2'O-Methyl Cytosine
  modified_base (3)..(3): gm
  modified_base (4)..(4): 2'O-Methyl Cytosine
  modified_base (5)..(6): gm
  modified_base (7)..(7): um
  modified_base (8)..(10): 2' Fluoro Guanosine
  modified_base (11)..(13): 2'O-Methyl Adenosine
  modified_base (14)..(14): um
  modified_base (15)..(15): 2' Fluoro Guanosine
  modified_base (16)..(16): um
  modified_base (17)..(17): 2' Fluoro Guanosine
  modified_base (18)..(18): 2'O-Methyl Adenosine
  modified_base (19)..(19): 2' Fluoro Guanosine
  modified_base (20)..(20): 2'O-Methyl Adenosine
  modified_base (21)..(21): um
  modified_base (22)..(24): 2' Fluoro Guanosine
  modified_base (25)..(26): um
  modified_base (27)..(27): gm
  modified_base (28)..(29): 2'O-Methyl Cytosine
  modified_base (30)..(30): gm
  modified_base (31)..(31): 2'O-Methyl Cytosine
  modified_base (32)..(32): gm
  modified_base (33)..(33): 2'O-Methyl Cytosine
  modified_base (34)..(34): gm
  modified_base (35)..(36): 2'O-Methyl Cytosine
  modified_base (37)..(37): gm
  modified_base (38)..(38): 2'O-Methyl Adenosine
  modified_base (39)..(39): 2'O-Methyl Cytosine
  modified_base (40)..(40): um
  modified_base (41)..(42): 2'O-Methyl Cytosine
  modified_base (43)..(43): 2' Fluoro Guanosine
  modified_base (44)..(44): 2'O-Methyl Cytosine
  modified_base (45)..(45): 2' Fluoro Guanosine
  modified_base (46)..(46): 2'O-Methyl Cytosine
  modified_base (47)..(48): 2' Fluoro Guanosine
  modified_base (49)..(49): 2'O-Methyl Adenosine
  modified_base (50)..(51): 2' Fluoro Guanosine
  modified_base (52)..(52): 2'O-Methyl Cytosine
  modified_base (53)..(54): um
  modified_base (55)..(55): 2' Fluoro Guanosine
  modified_base (56)..(56): 2'O-Methyl Adenosine
  modified_base (57)..(58): 2' Fluoro Guanosine
  modified_base (59)..(59): um
  modified_base (60)..(60): 2'O-Methyl Adenosine
  modified_base (61)..(61): 2' Fluoro Guanosine
  modified_base (62)..(63): 2'O-Methyl Cytosine
  modified_base (64)..(64): 2' Fluoro Guanosine
  modified_base (65)..(67): um
  modified_base (68)..(68): gm
  modified_base (69)..(69): um
  modified_base (70)..(70): 2'O-Methyl Cytosine
  modified_base (71)..(72): gm
  modified_base (73)..(73): 2'O-Methyl Cytosine
  modified_base (73)..(73): inverted deoxythymidine incorporated at the 3'  end
gcgcggugggaaaugugagauggguugccgcgcgccgacuccgcgcggaggcuugagguagccguuugucggc

SEQ ID NO: 250 - RNA, 73 nt, Artificial Sequence; identical to SEQ ID NO: 249
  aptamer
  modified_base (1)..(1): gm
  modified_base (2)..(2): 2'O-Methyl Cytosine
  modified_base (3)..(3): gm
  modified_base (4)..(4): 2'O-Methyl Cytosine
  modified_base (5)..(6): gm
  modified_base (7)..(7): um
  modified_base (8)..(10): 2' Fluoro Guanosine
  modified_base (11)..(13): 2'O-Methyl Adenosine
  modified_base (14)..(14): um
  modified_base (15)..(15): 2' Fluoro Guanosine
  modified_base (16)..(16): um
  modified_base (17)..(17): 2' Fluoro Guanosine
  modified_base (18)..(18): 2'O-Methyl Adenosine
  modified_base (19)..(19): 2' Fluoro Guanosine
  modified_base (20)..(20): 2'O-Methyl Adenosine
  modified_base (21)..(21): um
  modified_base (22)..(24): 2' Fluoro Guanosine
  modified_base (25)..(26): um
  modified_base (27)..(27): gm
  modified_base (28)..(29): 2'O-Methyl Cytosine
  modified_base (30)..(30): gm
  modified_base (31)..(31): 2'O-Methyl Cytosine
  modified_base (32)..(32): gm
  modified_base (33)..(33): 2'O-Methyl Cytosine
  modified_base (34)..(34): gm
  modified_base (35)..(36): 2'O-Methyl Cytosine
  modified_base (37)..(37): gm
  modified_base (38)..(38): 2'O-Methyl Adenosine
  modified_base (39)..(39): 2'O-Methyl Cytosine
  modified_base (40)..(40): um
  modified_base (41)..(42): 2'O-Methyl Cytosine
  modified_base (43)..(43): 2' Fluoro Guanosine
  modified_base (44)..(44): 2'O-Methyl Cytosine
  modified_base (45)..(45): 2' Fluoro Guanosine
  modified_base (46)..(46): 2'O-Methyl Cytosine
  modified_base (47)..(48): 2' Fluoro Guanosine
  modified_base (49)..(49): 2'O-Methyl Adenosine
  modified_base (50)..(51): 2' Fluoro Guanosine
  modified_base (52)..(52): 2'O-Methyl Cytosine
  modified_base (53)..(54): um
  modified_base (55)..(55): 2' Fluoro Guanosine
  modified_base (56)..(56): 2'O-Methyl Adenosine
  modified_base (57)..(58): 2' Fluoro Guanosine
  modified_base (59)..(59): um
  modified_base (60)..(60): 2'O-Methyl Adenosine
  modified_base (61)..(61): 2' Fluoro Guanosine
  modified_base (62)..(63): 2'O-Methyl Cytosine
  modified_base (64)..(64): 2' Fluoro Guanosine
  modified_base (65)..(67): um
  modified_base (68)..(68): gm
  modified_base (69)..(69): um
  modified_base (70)..(70): 2'O-Methyl Cytosine
  modified_base (71)..(72): gm
  modified_base (73)..(73): 2'O-Methyl Cytosine
  modified_base (73)..(73): inverted deoxythymidine incorporated at the 3'  end

SEQ ID NO: 251 - RNA, 73 nt, Artificial Sequence; identical to SEQ ID NO: 249
  aptamer
  modified_base (1)..(1): gm
  modified_base (2)..(2): 2'O-Methyl Cytosine
  modified_base (3)..(3): gm
  modified_base (4)..(4): 2'O-Methyl Cytosine
  modified_base (5)..(6): gm
  modified_base (7)..(7): um
  modified_base (8)..(10): 2'O-Methyl Cytosine
  modified_base (11)..(13): 2'O-Methyl Adenosine
  modified_base (14)..(14): um
  modified_base (15)..(15): 2'O-Methyl Cytosine
  modified_base (16)..(16): um
  modified_base (17)..(17): 2'O-Methyl Cytosine
  modified_base (18)..(18): 2'O-Methyl Adenosine
  modified_base (19)..(19): 2'O-Methyl Cytosine
  modified_base (20)..(20): 2'O-Methyl Adenosine
  modified_base (21)..(21): um
  modified_base (22)..(24): 2'O-Methyl Cytosine
  modified_base (25)..(26): um
  modified_base (27)..(27): gm
  modified_base (28)..(29): 2'O-Methyl Cytosine
  modified_base (30)..(30): gm
  modified_base (31)..(31): 2'O-Methyl Cytosine
  modified_base (32)..(32): gm
  modified_base (33)..(33): 2'O-Methyl Cytosine
  modified_base (34)..(34): gm
  modified_base (35)..(36): 2'O-Methyl Cytosine
  modified_base (37)..(37): gm
  modified_base (38)..(38): 2'O-Methyl Adenosine
  modified_base (39)..(39): 2'O-Methyl Cytosine
  modified_base (40)..(40): um
  modified_base (41)..(42): 2'O-Methyl Cytosine
  modified_base (43)..(43): 2'O-Methyl Cytosine
  modified_base (44)..(44): 2'O-Methyl Cytosine
  modified_base (45)..(45): 2'O-Methyl Cytosine
  modified_base (46)..(46): 2'O-Methyl Cytosine
  modified_base (47)..(48): 2'O-Methyl Cytosine
  modified_base (49)..(49): 2'O-Methyl Adenosine
  modified_base (50)..(51): 2'O-Methyl Cytosine
  modified_base (52)..(52): 2'O-Methyl Cytosine
  modified_base (53)..(54): um
  modified_base (55)..(55): 2'O-Methyl Cytosine
  modified_base (56)..(56): 2'O-Methyl Adenosine
  modified_base (57)..(58): 2'O-Methyl Cytosine
  modified_base (59)..(59): um
  modified_base (60)..(60): 2'O-Methyl Adenosine
  modified_base (61)..(61): 2'O-Methyl Cytosine
  modified_base (62)..(63): 2'O-Methyl Cytosine
  modified_base (64)..(64): 2'O-Methyl Cytosine
  modified_base (65)..(67): um
  modified_base (68)..(68): gm
  modified_base (69)..(69): um
  modified_base (70)..(70): 2'O-Methyl Cytosine
  modified_base (71)..(72): gm
  modified_base (73)..(73): 2'O-Methyl Cytosine
  modified_base (73)..(73): inverted deoxythymidine incorporated at the 3'  end

SEQ ID NO: 252 - RNA, 78 nt, Artificial Sequence
  aptamer
  modified_base (1)..(1): gm
  modified_base (2)..(2): 2'O-Methyl Cytosine
  modified_base (3)..(3): gm
  modified_base (4)..(4): 2'O-Methyl Cytosine
  modified_base (5)..(6): gm
  modified_base (7)..(7): um
  modified_base (8)..(10): 2' Fluoro Guanosine
  modified_base (11)..(13): 2'O-Methyl Adenosine
  modified_base (14)..(14): um
  modified_base (15)..(15): 2' Fluoro Guanosine
  modified_base (16)..(16): um
  modified_base (17)..(17): 2' Fluoro Guanosine
  modified_base (18)..(18): 2'O-Methyl Adenosine
  modified_base (19)..(19): 2' Fluoro Guanosine
  modified_base (20)..(20): 2'O-Methyl Adenosine
  modified_base (21)..(21): um
  modified_base (22)..(24): 2' Fluoro Guanosine
  modified_base (25)..(26): um
  modified_base (27)..(27): gm
  modified_base (28)..(29): 2'O-Methyl Cytosine
  modified_base (30)..(30): gm
  modified_base (31)..(31): 2'O-Methyl Cytosine
  modified_base (32)..(32): gm
  modified_base (33)..(33): 2'O-Methyl Cytosine
  modified_base (34)..(38): 2'O-Methyl deoxyuridine
  misc_feature (34)..(38): 2'O-Methyl deoxyuridine linker
  modified_base (39)..(39): gm
  modified_base (40)..(41): 2'O-Methyl Cytosine
  modified_base (42)..(42): 2' Fluoro Guanosine
  modified_base (43)..(43): 2'O-Methyl Adenosine
  modified_base (44)..(44): 2'O-Methyl Cytosine
  modified_base (45)..(45): um
  modified_base (46)..(47): 2'O-Methyl Cytosine
  modified_base (48)..(48): 2' Fluoro Guanosine
  modified_base (49)..(49): 2'O-Methyl Cytosine
  modified_base (50)..(50): 2' Fluoro Guanosine
  modified_base (51)..(51): 2'O-Methyl Cytosine
  modified_base (52)..(53): 2' Fluoro Guanosine
  modified_base (54)..(54): 2'O-Methyl Adenosine
  modified_base (55)..(56): 2' Fluoro Guanosine
  modified_base (57)..(57): 2'O-Methyl Cytosine
  modified_base (58)..(59): um
  modified_base (60)..(60): 2' Fluoro Guanosine
  modified_base (61)..(61): 2'O-Methyl Adenosine
  modified_base (62)..(63): 2' Fluoro Guanosine
  modified_base (64)..(64): um
  modified_base (65)..(65): 2'O-Methyl Adenosine
  modified_base (66)..(66): 2' Fluoro Guanosine
  modified_base (67)..(68): 2'O-Methyl Cytosine
  modified_base (69)..(69): 2' Fluoro Guanosine
  modified_base (70)..(72): um
  modified_base (73)..(73): gm
  modified_base (74)..(74): um
  modified_base (75)..(75): 2'O-Methyl Cytosine
  modified_base (76)..(77): gm
  modified_base (78)..(78): 2'O-Methyl Cytosine
  modified_base (78)..(78): inverted deoxythymidine incorporated at the 3'  end
gcgcggugggaaaugugagauggguugccgcgcuuuuugccgacuccgcgcggaggcuugagguagccguuugucggc

SEQ ID NO: 253 - RNA, 83 nt, Artificial Sequence
  aptamer
  modified_base (1)..(1): gm
  modified_base (2)..(2): 2'O-Methyl Cytosine
  modified_base (3)..(3): gm
  modified_base (4)..(4): 2'O-Methyl Cytosine
  modified_base (5)..(6): gm
  modified_base (7)..(7): um
  modified_base (8)..(10): 2' Fluoro Guanosine
  modified_base (11)..(13): 2'O-Methyl Adenosine
  modified_base (14)..(14): um
  modified_base (15)..(15): 2' Fluoro Guanosine
  modified_base (16)..(16): um
  modified_base (17)..(17): 2' Fluoro Guanosine
  modified_base (18)..(18): 2'O-Methyl Adenosine
  modified_base (19)..(19): 2' Fluoro Guanosine
  modified_base (20)..(20): 2'O-Methyl Adenosine
  modified_base (21)..(21): um
  modified_base (22)..(24): 2' Fluoro Guanosine
  modified_base (25)..(26): um
  modified_base (27)..(27): gm
  modified_base (28)..(29): 2'O-Methyl Cytosine
  modified_base (30)..(30): gm
  modified_base (31)..(31): 2'O-Methyl Cytosine
  modified_base (32)..(32): gm
  modified_base (33)..(33): 2'O-Methyl Cytosine
  modified_base (34)..(43): 2'O-Methyl deoxyuridine
  misc_feature (34)..(43): 2'O-Methyl deoxyuridine linker
  modified_base (44)..(44): gm
  modified_base (45)..(46): 2'O-Methyl Cytosine
  modified_base (47)..(47): gm
  modified_base (48)..(48): 2'O-Methyl Adenosine
  modified_base (49)..(49): 2'O-Methyl Cytosine
  modified_base (50)..(50): um
  modified_base (51)..(52): 2'O-Methyl Cytosine
  modified_base (53)..(53): 2' Fluoro Guanosine
  modified_base (54)..(54): 2'O-Methyl Cytosine
  modified_base (55)..(55): 2' Fluoro Guanosine
  modified_base (56)..(56): 2'O-Methyl Cytosine
  modified_base (57)..(58): 2' Fluoro Guanosine
  modified_base (59)..(59): 2'O-Methyl Adenosine
  modified_base (60)..(61): 2' Fluoro Guanosine
  modified_base (62)..(62): 2'O-Methyl Cytosine
  modified_base (63)..(64): um
  modified_base (65)..(65): 2' Fluoro Guanosine
  modified_base (66)..(66): 2'O-Methyl Adenosine
  modified_base (67)..(68): 2' Fluoro Guanosine
  modified_base (69)..(69): um
  modified_base (70)..(70): 2'O-Methyl Adenosine
  modified_base (71)..(71): 2' Fluoro Guanosine
  modified_base (72)..(73): 2'O-Methyl Cytosine
  modified_base (74)..(74): 2' Fluoro Guanosine
  modified_base (75)..(77): um
  modified_base (78)..(78): gm
  modified_base (79)..(79): um
  modified_base (80)..(80): 2'O-Methyl Cytosine
  modified_base (81)..(82): gm
  modified_base (83)..(83): 2'O-Methyl Cytosine
  modified_base (83)..(83): inverted deoxythymidine incorporated at the 3'  end
gcgcggugggaaaugugagauggguugccgcgcuuuuuuuuuugccgacuccgcgcggaggcuugagguagccguuugucggc

SEQ ID NO: 254 - RNA, 60 nt, Artificial Sequence
  aptamer
  modified_base (1)..(2): 2'O-Methyl Cytosine
  misc_feature (1)..(1): The 2'O-Methyl cytosine is attached through the linker 1,3-propanediolspacer to 2'O-Methyl cytosine of another nucleotide sequence CXAC
  modified_base (3)..(3): 2' Fluoro Guanosine
  modified_base (4)..(4): 2'O-Methyl Cytosine
  modified_base (5)..(5): 2' Fluoro Guanosine
  modified_base (6)..(6): 2'O-Methyl Cytosine
  modified_base (7)..(8): 2' Fluoro Guanosine
  modified_base (9)..(9): 2'O-Methyl Adenosine
  modified_base (10)..(11): 2' Fluoro Guanosine
  modified_base (12)..(12): 2'O-Methyl Cytosine
  modified_base (13)..(14): um
  modified_base (15)..(15): 2' Fluoro Guanosine
  modified_base (16)..(16): 2'O-Methyl Adenosine
  modified_base (17)..(18): 2' Fluoro Guanosine
  modified_base (19)..(19): um
  modified_base (20)..(20): 2'O-Methyl Adenosine
  modified_base (21)..(21): 2' Fluoro Guanosine
  modified_base (22)..(23): 2'O-Methyl Cytosine
  modified_base (24)..(24): 2' Fluoro Guanosine
  modified_base (25)..(27): um
  modified_base (28)..(28): gm
  modified_base (29)..(29): um
  modified_base (29)..(29): um
  modified_base (30)..(30): 2'O-Methyl Cytosine
  modified_base (31)..(32): gm
  modified_base (33)..(33): 2'O-Methyl Cytosine
  modified_base (34)..(34): gm
  modified_base (36)..(36): um
  modified_base (37)..(39): 2' Fluoro Guanosine
  modified_base (37)..(38): gm
  modified_base (40)..(42): 2'O-Methyl Adenosine
  modified_base (43)..(43): um
  modified_base (44)..(44): 2' Fluoro Guanosine
  modified_base (45)..(45): um
  modified_base (46)..(46): 2' Fluoro Guanosine
  modified_base (47)..(47): 2'O-Methyl Adenosine
  modified_base (48)..(48): 2' Fluoro Guanosine
  modified_base (49)..(49): 2'O-Methyl Adenosine
  modified_base (50)..(50): um
  modified_base (51)..(53): 2' Fluoro Guanosine
  modified_base (54)..(55): um
  modified_base (57)..(58): 2'O-Methyl Cytosine
  modified_base (60)..(60): 2'O-Methyl Cytosine
  modified_base (60)..(60): inverted deoxythymidine incorporated at the 3'  end
ccgcgcggaggcuugagguagccguuugucggcggugggaaaugugagauggguugccgc

SEQ ID NO: 255 - RNA, 31 nt, Artificial Sequence; identical to SEQ ID NO: 20
  aptamer
  modified_base (1)..(2): 2'O-Methyl Cytosine
  misc_feature (1)..(1): The 2'O-Methyl cytosine is attached through the linker 1,3-propanediol spacer to 2'O-Methyl cytosine of another nucleotide sequence CXAC
  modified_base (3)..(3): 2' Fluoro Guanosine
  modified_base (4)..(4): 2'O-Methyl Cytosine
  modified_base (5)..(5): 2' Fluoro Guanosine
  modified_base (6)..(6): 2'O-Methyl Cytosine
  modified_base (7)..(8): 2' Fluoro Guanosine
  modified_base (9)..(9): 2'O-Methyl Adenosine
  modified_base (10)..(11): 2' Fluoro Guanosine
  modified_base (12)..(12): 2'O-Methyl Cytosine
  modified_base (13)..(14): um
  modified_base (15)..(15): 2' Fluoro Guanosine
  modified_base (16)..(16): 2'O-Methyl Adenosine
  modified_base (17)..(18): 2' Fluoro Guanosine
  modified_base (19)..(19): um
  modified_base (20)..(20): 2'O-Methyl Adenosine
  modified_base (21)..(21): 2' Fluoro Guanosine
  modified_base (22)..(23): 2'O-Methyl Cytosine
  modified_base (24)..(24): 2' Fluoro Guanosine
  modified_base (25)..(27): um
  modified_base (28)..(28): gm
  modified_base (29)..(29): um
  modified_base (30)..(30): 2'O-Methyl Cytosine
  modified_base (31)..(31): gm
  misc_feature (31)..(31): The 2'O-Methyl Guanosine is attached through the linker 1,3-propanediol spacer to 2'O-Methyl Guanosine of SEQ ID NO:362

SEQ ID NO: 256 - RNA, 31 nt, Artificial Sequence; identical to SEQ ID NO: 20
  aptamer
  modified_base (1)..(2): 2'O-Methyl Cytosine
  misc_feature (1)..(1): The 2'O-Methyl cytosine is attached through the linker 1,3-propanediol spacer to 2'O-Methyl cytosine of another nucleotide sequence CXAC
  modified_base (3)..(3): 2' Fluoro Guanosine
  modified_base (4)..(6): 2'O-Methyl Cytosine
  modified_base (5)..(5): 2' Fluoro Guanosine
  modified_base (7)..(8): 2' Fluoro Guanosine
  modified_base (9)..(9): 2'O-Methyl Adenosine
  modified_base (10)..(11): 2' Fluoro Guanosine
  modified_base (12)..(12): 2'O-Methyl Cytosine
  modified_base (13)..(14): um
  modified_base (15)..(15): 2' Fluoro Guanosine
  modified_base (16)..(16): 2'O-Methyl Adenosine
  modified_base (17)..(18): 2' Fluoro Guanosine
  modified_base (19)..(19): um
  modified_base (20)..(20): 2'O-Methyl Adenosine
  modified_base (21)..(21): 2' Fluoro Guanosine
  modified_base (22)..(23): 2'O-Methyl Cytosine
  modified_base (24)..(24): 2' Fluoro Guanosine
  modified_base (25)..(27): um
  modified_base (28)..(28): gm
  modified_base (29)..(29): um
  modified_base (30)..(30): 2'O-Methyl Cytosine
  modified_base (31)..(31): gm
  misc_feature (31)..(31): The 2'O-Methyl Guanosine is attached through the linker Hexaethyleneglycol spacer to 2'O-Methyl Guanosine of SEQ ID NO:363

SEQ ID NO: 257 - RNA, 65 nt, Artificial Sequence
  aptamer
  modified_base (1)..(2): 2'O-Methyl Cytosine
  misc_feature (1)..(1): The 2'O-Methyl cytosine is attached through the linker 1,3-propanediol spacer to 2'O-Methyl cytosine of another nucleotide sequence CXAC
  modified_base (3)..(3): 2' Fluoro Guanosine
  modified_base (4)..(4): 2'O-Methyl Cytosine
  modified_base (5)..(5): 2' Fluoro Guanosine
  modified_base (6)..(6): 2'O-Methyl Cytosine
  modified_base (7)..(8): 2' Fluoro Guanosine
  modified_base (9)..(9): 2'O-Methyl Adenosine
  modified_base (10)..(11): 2' Fluoro Guanosine
  modified_base (12)..(12): 2'O-Methyl Cytosine
  modified_base (13)..(14): um
  modified_base (15)..(15): 2' Fluoro Guanosine
  modified_base (16)..(16): 2'O-Methyl Adenosine
  modified_base (17)..(18): 2' Fluoro Guanosine
  modified_base (19)..(19): um
  modified_base (20)..(20): 2'O-Methyl Adenosine
  modified_base (21)..(21): 2' Fluoro Guanosine
  modified_base (22)..(23): 2'O-Methyl Cytosine
  modified_base (24)..(24): 2' Fluoro Guanosine
  modified_base (25)..(27): um
  modified_base (28)..(28): gm
  modified_base (29)..(29): um
  modified_base (30)..(30): 2'O-Methyl Cytosine
  modified_base (31)..(31): gm
  modified_base (32)..(36): 2'O-Methyl deoxyuridine
  misc_feature (32)..(36): 2'O-Methyl deoxyuridine linker
  modified_base (37)..(37): gm
  modified_base (38)..(38): 2'O-Methyl Cytosine
  modified_base (39)..(39): gm
  modified_base (40)..(40): gm
  modified_base (41)..(41): um
  modified_base (42)..(44): 2' Fluoro Guanosine
  modified_base (45)..(47): 2'O-Methyl Adenosine
  modified_base (48)..(48): um
  modified_base (49)..(49): 2' Fluoro Guanosine
  modified_base (50)..(50): um
  modified_base (51)..(51): 2' Fluoro Guanosine
  modified_base (52)..(52): 2'O-Methyl Adenosine
  modified_base (53)..(53): 2' Fluoro Guanosine
  modified_base (54)..(54): 2'O-Methyl Adenosine
  modified_base (55)..(55): um
  modified_base (56)..(58): 2' Fluoro Guanosine
  modified_base (59)..(60): um
  modified_base (61)..(61): gm
  modified_base (62)..(63): 2'O-Methyl Cytosine
  modified_base (64)..(64): gm
  modified_base (65)..(65): 2'O-Methyl Cytosine
  modified_base (65)..(65): inverted deoxythymidine incorporated at the 3'  end
ccgcgcggaggcuugagguagccguuugucguuuuugcggugggaaaugugagauggguugccgc

SEQ ID NO: 258 - RNA, 70 nt, Artificial Sequence
  aptamer
  modified_base (1)..(2): 2'O-Methyl Cytosine
  misc_feature (1)..(1): The 2'O-Methyl cytosine is attached through the linker 1,3-propanediol spacer to 2'O-Methyl cytosine of another nucleotide sequence CXAC
  modified_base (3)..(3): 2' Fluoro Guanosine
  modified_base (4)..(4): 2'O-Methyl Cytosine
  modified_base (5)..(5): 2' Fluoro Guanosine
  modified_base (6)..(6): 2'O-Methyl Cytosine
  modified_base (7)..(8): 2' Fluoro Guanosine
  modified_base (9)..(9): 2'O-Methyl Adenosine
  modified_base (10)..(11): 2' Fluoro Guanosine
  modified_base (12)..(12): 2'O-Methyl Cytosine
  modified_base (13)..(14): um
  modified_base (15)..(15): 2' Fluoro Guanosine
  modified_base (16)..(16): 2'O-Methyl Adenosine
  modified_base (17)..(18): 2' Fluoro Guanosine
  modified_base (19)..(19): um
  modified_base (20)..(20): 2'O-Methyl Adenosine
  modified_base (21)..(21): 2' Fluoro Guanosine
  modified_base (22)..(23): 2'O-Methyl Cytosine
  modified_base (24)..(24): 2' Fluoro Guanosine
  modified_base (25)..(27): um
  modified_base (28)..(28): gm
  modified_base (29)..(29): um
  modified_base (30)..(30): 2'O-Methyl Cytosine
  modified_base (31)..(31): gm
  modified_base (32)..(41): 2'O-Methyl deoxyuridine
  misc_feature (32)..(41): 2'O-Methyl deoxyuridine linker
  modified_base (42)..(42): gm
  modified_base (43)..(43): 2'O-Methyl Cytosine
  modified_base (44)..(45): gm
  modified_base (46)..(46): um
  modified_base (47)..(49): 2' Fluoro Guanosine
  modified_base (50)..(52): 2'O-Methyl Adenosine
  modified_base (53)..(53): um
  modified_base (54)..(54): 2' Fluoro Guanosine
  modified_base (55)..(55): um
  modified_base (56)..(56): 2' Fluoro Guanosine
  modified_base (57)..(57): 2'O-Methyl Adenosine
  modified_base (58)..(58): 2' Fluoro Guanosine
  modified_base (59)..(59): 2'O-Methyl Adenosine
  modified_base (60)..(60): um
  modified_base (61)..(63): 2' Fluoro Guanosine
  modified_base (64)..(65): um
  modified_base (66)..(66): gm
  modified_base (67)..(68): 2'O-Methyl Cytosine
  modified_base (69)..(69): gm
  modified_base (70)..(70): 2'O-Methyl Cytosine
  modified_base (70)..(70): inverted deoxythymidine incorporated at the 3'  end
ccgcgcggaggcuugagguagccguuugucguuuuuuuuuugcggugggaaaugugagauggguugccgc

SEQ ID NO: 259 - RNA, 33 nt, Artificial Sequence; identical to SEQ ID NO: 178
  aptamer
  modified_base (1)..(1): gm
  modified_base (2)..(2): 2'O-Methyl Cytosine
  modified_base (3)..(4): gm
  modified_base (5)..(5): um
  modified_base (6)..(8): 2' Fluoro Guanosine
  modified_base (9)..(11): 2'O-Methyl Adenosine
  modified_base (12)..(12): um
  modified_base (13)..(13): 2' Fluoro Guanosine
  modified_base (14)..(14): um
  modified_base (15)..(15): 2' Fluoro Guanosine
  modified_base (16)..(16): 2'O-Methyl Adenosine
  modified_base (17)..(17): 2' Fluoro Guanosine
  modified_base (18)..(18): 2'O-Methyl Adenosine
  modified_base (19)..(19): um
  modified_base (20)..(22): 2' Fluoro Guanosine
  modified_base (23)..(24): um
  modified_base (25)..(25): gm
  modified_base (26)..(27): 2'O-Methyl Cytosine
  modified_base (28)..(28): gm
  modified_base (29)..(30): 2'O-Methyl Cytosine
  modified_base (31)..(31): gm
  modified_base (32)..(32): 2'O-Methyl Adenosine
  modified_base (33)..(33): 2'O-Methyl Cytosine
  misc_feature (33)..(33): The 2'O-Methyl cytosine is attached through the linker 1,3-propanediol spacer to 2'O-Methyl cytosine of SEQ ID NO: 364

SEQ ID NO: 260 - RNA, 29 nt, Artificial Sequence
  aptamer
  modified_base (1)..(1): gm
  modified_base (2)..(2): 2'O-Methyl Cytosine
  modified_base (3)..(4): gm
  modified_base (5)..(5): um
  modified_base (6)..(8): 2' Fluoro Guanosine
  modified_base (9)..(11): 2'O-Methyl Adenosine
  modified_base (12)..(12): um
  modified_base (13)..(13): 2' Fluoro Guanosine
  modified_base (14)..(14): um
  modified_base (15)..(15): 2' Fluoro Guanosine
  modified_base (16)..(16): 2'O-Methyl Adenosine
  modified_base (17)..(17): 2' Fluoro Guanosine
  modified_base (18)..(18): 2'O-Methyl Adenosine
  modified_base (19)..(19): um
  modified_base (20)..(22): 2' Fluoro Guanosine
  modified_base (23)..(24): um
  modified_base (25)..(25): gm
  modified_base (26)..(27): 2'O-Methyl Cytosine
  modified_base (28)..(28): gm
  modified_base (29)..(29): 2'O-Methyl Cytosine
  misc_feature (29)..(29): The 2'O-Methyl cytosine is attached through the linker 1,3-propanediol spacer to 2'O-Methyl cytosine of another nucleotide sequence CXAC
gcggugggaaaugugagauggguugccgc

SEQ ID NO: 261 - RNA, 29 nt, Artificial Sequence
  aptamer
  modified_base (1)..(1): gm
  modified_base (2)..(2): 2'O-Methyl Cytosine
  modified_base (3)..(4): gm
  modified_base (5)..(5): um
  modified_base (6)..(8): 2' Fluoro Guanosine
  modified_base (9)..(11): 2'O-Methyl Adenosine
  modified_base (12)..(12): um
  modified_base (13)..(13): 2' Fluoro Guanosine
  modified_base (14)..(14): um
  modified_base (15)..(15): 2' Fluoro Guanosine
  modified_base (16)..(16): 2'O-Methyl Adenosine
  modified_base (17)..(17): 2' Fluoro Guanosine
  modified_base (18)..(18): 2'O-Methyl Adenosine
  modified_base (19)..(19): um
  modified_base (20)..(22): 2' Fluoro Guanosine
  modified_base (23)..(24): um
  modified_base (25)..(25): gm
  modified_base (26)..(27): 2'O-Methyl Cytosine
  modified_base (28)..(28): gm
  modified_base (29)..(29): 2'O-Methyl Cytosine
  misc_feature (29)..(29): The 2'O-Methyl cytosine is attached through the linker Hexaethyleneglycol spacer to 2'O-Methyl cytosine of another nucleotide sequence CXAC
gcggugggaaaugugagauggguugccgc

SEQ ID NO: 262 - RNA, 38 nt, Artificial Sequence; identical to SEQ ID NO: 181
  aptamer
  modified_base (1)..(1): gm
  modified_base (2)..(2): 2'O-Methyl Cytosine
  modified_base (3)..(4): gm
  modified_base (5)..(5): um
  modified_base (6)..(8): 2' Fluoro Guanosine
  modified_base (9)..(11): 2'O-Methyl Adenosine
  modified_base (12)..(12): um
  modified_base (13)..(13): 2' Fluoro Guanosine
  modified_base (14)..(14): um
  modified_base (15)..(15): 2' Fluoro Guanosine
  modified_base (16)..(16): 2'O-Methyl Adenosine
  modified_base (17)..(17): 2' Fluoro Guanosine
  modified_base (18)..(18): 2'O-Methyl Adenosine
  modified_base (19)..(19): um
  modified_base (20)..(22): 2' Fluoro Guanosine
  modified_base (23)..(24): um
  modified_base (25)..(25): gm
  modified_base (26)..(27): 2'O-Methyl Cytosine
  modified_base (28)..(28): gm
  modified_base (29)..(29): 2'O-Methyl Cytosine
  modified_base (30)..(34): 2'O-Methyl deoxyuridine
  misc_feature (30)..(34): 2'O-Methyl deoxyuridine linker
  modified_base (35)..(35): 2'O-Methyl Cytosine
  modified_base (36)..(36): gm
  modified_base (37)..(37): 2'O-Methyl Adenosine
  modified_base (38)..(38): 2'O-Methyl Cytosine
  misc_feature (38)..(38): The 2'O-Methyl cytosine is attached through the linker 1,3-propanediol spacer to 2'O-Methyl cytosine of SEQ ID NO:367

SEQ ID NO: 263 - RNA, 43 nt, Artificial Sequence
  aptamer
  modified_base (1)..(1): gm
  modified_base (2)..(2): 2'O-Methyl Cytosine
  modified_base (3)..(4): gm
  modified_base (5)..(5): um
  modified_base (6)..(8): 2' Fluoro Guanosine
  modified_base (9)..(11): 2'O-Methyl Adenosine
  modified_base (12)..(12): um
  modified_base (13)..(13): 2' Fluoro Guanosine
  modified_base (14)..(14): um
  modified_base (15)..(15): 2' Fluoro Guanosine
  modified_base (16)..(16): 2'O-Methyl Adenosine
  modified_base (17)..(17): 2' Fluoro Guanosine
  modified_base (18)..(18): 2'O-Methyl Adenosine
  modified_base (19)..(19): um
  modified_base (20)..(22): 2' Fluoro Guanosine
  modified_base (23)..(24): um
  modified_base (25)..(25): gm
  modified_base (26)..(27): 2'O-Methyl Cytosine
  modified_base (28)..(28): gm
  modified_base (29)..(29): 2'O-Methyl Cytosine
  modified_base (30)..(39): 2'O-Methyl deoxyuridine
  misc_feature (30)..(39): 2'O-Methyl deoxyuridine linker
  modified_base (40)..(40): 2'O-Methyl Cytosine
  modified_base (41)..(41): gm
  modified_base (42)..(42): 2'O-Methyl Adenosine
  modified_base (43)..(43): 2'O-Methyl Cytosine
  misc_feature (43)..(43): The 2'O-Methyl cytosine is attached through the linker 1,3-propanediol spacer to 2'O-Methyl cytosine of SEQ ID NO:368
gcggugggaaaugugagauggguugccgcuuuuuuuuuucgac

SEQ ID NO: 264 - RNA, 62 nt, Artificial Sequence
  aptamer
  modified_base (1)..(2): 2'O-Methyl Cytosine
  misc_feature (1)..(1): The 2'O-Methyl cytosine is attached through the linker 1,3-propanediol spacer to 2'O-Methyl cytosine of another nucleotide sequence XCCXAC
  modified_base (3)..(3): 2' Fluoro Guanosine
  modified_base (4)..(4): 2'O-Methyl Cytosine
  modified_base (5)..(5): 2' Fluoro Guanosine
  modified_base (6)..(6): 2'O-Methyl Cytosine
  modified_base (7)..(8): 2' Fluoro Guanosine
  modified_base (9)..(9): 2'O-Methyl Adenosine
  modified_base (10)..(11): 2' Fluoro Guanosine
  modified_base (12)..(12): 2'O-Methyl Cytosine
  modified_base (13)..(14): um
  modified_base (15)..(15): 2' Fluoro Guanosine
  modified_base (16)..(16): 2'O-Methyl Adenosine
  modified_base (17)..(18): 2' Fluoro Guanosine
  modified_base (19)..(19): um
  modified_base (20)..(20): 2'O-Methyl Adenosine
  modified_base (21)..(21): 2' Fluoro Guanosine
  modified_base (22)..(23): 2'O-Methyl Cytosine
  modified_base (24)..(24): 2' Fluoro Guanosine
  modified_base (25)..(27): um
  modified_base (28)..(28): gm
  modified_base (29)..(29): um
  modified_base (30)..(30): 2'O-Methyl Cytosine
  modified_base (31)..(32): gm
  modified_base (33)..(33): 2'O-Methyl Cytosine
  modified_base (34)..(34): gm
  modified_base (35)..(35): 2'O-Methyl Cytosine
  modified_base (36)..(37): gm
  modified_base (38)..(38): um
  modified_base (39)..(41): 2' Fluoro Guanosine
  modified_base (42)..(44): 2'O-Methyl Adenosine
  modified_base (45)..(45): um
  modified_base (46)..(46): 2' Fluoro Guanosine
  modified_base (47)..(47): um
  modified_base (48)..(48): 2' Fluoro Guanosine
  modified_base (49)..(49): 2'O-Methyl Adenosine
  modified_base (50)..(50): 2' Fluoro Guanosine
  modified_base (51)..(51): 2'O-Methyl Adenosine
  modified_base (52)..(52): um
  modified_base (53)..(55): 2' Fluoro Guanosine
  modified_base (56)..(57): um
  modified_base (58)..(58): gm
  modified_base (59)..(60): 2'O-Methyl Cytosine
  modified_base (61)..(61): gm
  modified_base (62)..(62): 2'O-Methyl Cytosine
  modified_base (62)..(62): inverted deoxythymidine incorporated at the 3'  end
ccgcgcggaggcuugagguagccguuugucggcgcggugggaaaugugagauggguugccgc

SEQ ID NO: 265 - RNA, 33 nt, Artificial Sequence; identical to SEQ ID NO: 152
  aptamer
  modified_base (1)..(2): 2'O-Methyl Cytosine
  misc_feature (1)..(1): The 2'O-Methyl cytosine is attached through the linker 1,3-propanediol spacer to 2'O-Methyl cytosine of another nucleotide sequence XCCXAC
  modified_base (3)..(3): 2' Fluoro Guanosine
  modified_base (4)..(4): 2'O-Methyl Cytosine
  modified_base (5)..(5): 2' Fluoro Guanosine
  modified_base (6)..(6): 2'O-Methyl Cytosine
  modified_base (7)..(7): 2' Fluoro Guanosine
  modified_base (9)..(9): 2'O-Methyl Adenosine
  modified_base (10)..(11): 2' Fluoro Guanosine
  modified_base (12)..(12): 2'O-Methyl Cytosine
  modified_base (13)..(14): um
  modified_base (15)..(15): 2' Fluoro Guanosine
  modified_base (16)..(16): 2'O-Methyl Adenosine
  modified_base (17)..(18): 2' Fluoro Guanosine
  modified_base (19)..(19): um
  modified_base (20)..(20): 2'O-Methyl Adenosine
  modified_base (21)..(21): 2' Fluoro Guanosine
  modified_base (22)..(23): 2'O-Methyl Cytosine
  modified_base (24)..(24): 2' Fluoro Guanosine
  modified_base (25)..(27): um
  modified_base (28)..(28): gm
  modified_base (29)..(29): um
  modified_base (30)..(30): 2'O-Methyl Cytosine
  modified_base (31)..(32): gm
  modified_base (33)..(33): 2'O-Methyl Cytosine
  misc_feature (33)..(33): The 2'O-Methyl cytosine is attached through the linker 1,3-propanediol spacer to  2'O-Methyl Guanosine of SEQ ID NO:369

SEQ ID NO: 266 - RNA, 33 nt, Artificial Sequence; identical to SEQ ID NO: 152
  aptamer
  modified_base (1)..(2): 2'O-Methyl Cytosine
  misc_feature (1)..(1): The 2'O-Methyl cytosine is attached through the linker 1,3-propanediol spacer to 2'O-Methyl cytosine of another nucleotide sequence XCCXAC
  modified_base (3)..(3): 2' Fluoro Guanosine
  modified_base (4)..(4): 2'O-Methyl Cytosine
  modified_base (5)..(5): 2' Fluoro Guanosine
  modified_base (6)..(6): 2'O-Methyl Cytosine
  modified_base (7)..(8): 2' Fluoro Guanosine
  modified_base (9)..(9): 2'O-Methyl Adenosine
  modified_base (10)..(11): 2' Fluoro Guanosine
  modified_base (12)..(12): 2'O-Methyl Cytosine
  modified_base (13)..(14): um
  modified_base (15)..(15): 2' Fluoro Guanosine
  modified_base (16)..(16): 2'O-Methyl Adenosine
  modified_base (17)..(18): 2' Fluoro Guanosine
  modified_base (19)..(19): um
  modified_base (20)..(20): 2'O-Methyl Adenosine
  modified_base (21)..(21): 2' Fluoro Guanosine
  modified_base (22)..(23): 2'O-Methyl Cytosine
  modified_base (24)..(24): 2' Fluoro Guanosine
  modified_base (25)..(27): um
  modified_base (28)..(28): gm
  modified_base (29)..(29): um
  modified_base (30)..(30): 2'O-Methyl Cytosine
  modified_base (31)..(32): gm
  modified_base (33)..(33): 2'O-Methyl Cytosine
  misc_feature (33)..(33): The 2'O-Methyl cytosine is attached through the linker Hexaethyleneglycol spacer to 2'O-Methyl Guanosine of SEQ ID NO:370

SEQ ID NO: 267 - RNA, 67 nt, Artificial Sequence
  aptamer
  modified_base (1)..(2): 2'O-Methyl Cytosine
  misc_feature (1)..(1): The 2'O-Methyl cytosine is attached through the linker 1,3-propanediol spacer to 2'O-Methyl cytosine of another nucleotide sequence XCCXAC
  modified_base (3)..(3): 2' Fluoro Guanosine
  modified_base (4)..(4): 2'O-Methyl Cytosine
  modified_base (5)..(5): 2' Fluoro Guanosine
  modified_base (6)..(6): 2'O-Methyl Cytosine
  modified_base (7)..(8): 2' Fluoro Guanosine
  modified_base (9)..(9): 2'O-Methyl Adenosine
  modified_base (10)..(11): 2' Fluoro Guanosine
  modified_base (12)..(12): 2'O-Methyl Cytosine
  modified_base (13)..(14): um
  modified_base (15)..(15): 2' Fluoro Guanosine
  modified_base (16)..(16): 2'O-Methyl Adenosine
  modified_base (17)..(18): 2' Fluoro Guanosine
  modified_base (19)..(19): um
  modified_base (20)..(20): 2'O-Methyl Adenosine
  modified_base (21)..(21): 2' Fluoro Guanosine
  modified_base (22)..(23): 2'O-Methyl Cytosine
  modified_base (24)..(24): 2' Fluoro Guanosine
  modified_base (25)..(27): um
  modified_base (28)..(28): gm
  modified_base (29)..(29): um
  modified_base (30)..(30): 2'O-Methyl Cytosine
  modified_base (31)..(32): gm
  modified_base (33)..(33): 2'O-Methyl Cytosine
  modified_base (34)..(38): 2'O-Methyl deoxyuridine
  misc_feature (34)..(38): 2'O-Methyl deoxyuridine linker
  modified_base (39)..(39): gm
  modified_base (40)..(40): 2'O-Methyl Cytosine
  modified_base (41)..(42): gm
  modified_base (43)..(43): um
  modified_base (44)..(46): 2' Fluoro Guanosine
  modified_base (47)..(49): 2'O-Methyl Adenosine
  modified_base (50)..(50): um
  modified_base (51)..(51): 2' Fluoro Guanosine
  modified_base (52)..(52): um
  modified_base (53)..(53): 2' Fluoro Guanosine
  modified_base (54)..(54): 2'O-Methyl Adenosine
  modified_base (55)..(55): 2' Fluoro Guanosine
  modified_base (56)..(56): 2'O-Methyl Adenosine
  modified_base (57)..(57): um
  modified_base (58)..(60): 2' Fluoro Guanosine
  modified_base (61)..(62): um
  modified_base (63)..(63): gm
  modified_base (64)..(65): 2'O-Methyl Cytosine
  modified_base (66)..(66): gm
  modified_base (67)..(67): 2'O-Methyl Cytosine
  modified_base (67)..(67): inverted deoxythymidine incorporated at the 3'  end
ccgcgcggaggcuugagguagccguuugucggcuuuuugcggugggaaaugugagauggguugccgc

SEQ ID NO: 268 - RNA, 72 nt, Artificial Sequence
  aptamer
  modified_base (1)..(2): 2'O-Methyl Cytosine
  misc_feature (1)..(1): The 2'O-Methyl cytosine is attached through the linker 1,3-propanediol spacer to 2'O-Methyl cytosine of another nucleotide sequence XCCXAC
  modified_base (3)..(3): 2' Fluoro Guanosine
  modified_base (4)..(4): 2'O-Methyl Cytosine
  modified_base (5)..(5): 2' Fluoro Guanosine
  modified_base (6)..(6): 2'O-Methyl Cytosine
  modified_base (7)..(8): 2' Fluoro Guanosine
  modified_base (9)..(9): 2'O-Methyl Adenosine
  modified_base (10)..(11): 2' Fluoro Guanosine
  modified_base (12)..(12): 2'O-Methyl Cytosine
  modified_base (13)..(14): um
  modified_base (15)..(15): 2' Fluoro Guanosine
  modified_base (16)..(16): 2'O-Methyl Adenosine
  modified_base (17)..(18): 2' Fluoro Guanosine
  modified_base (19)..(19): um
  modified_base (20)..(20): 2'O-Methyl Adenosine
  modified_base (21)..(21): 2' Fluoro Guanosine
  modified_base (22)..(23): 2'O-Methyl Cytosine
  modified_base (24)..(24): 2' Fluoro Guanosine
  modified_base (25)..(27): um
  modified_base (28)..(28): gm
  modified_base (29)..(29): um
  modified_base (30)..(30): 2'O-Methyl Cytosine
  modified_base (31)..(32): gm
  modified_base (33)..(33): 2'O-Methyl Cytosine
  modified_base (34)..(43): 2'O-Methyl deoxyuridine
  misc_feature (34)..(43): 2'O-Methyl deoxyuridine linker
  modified_base (44)..(44): gm
  modified_base (45)..(45): 2'O-Methyl Cytosine
  modified_base (46)..(47): gm
  modified_base (48)..(48): um
  modified_base (49)..(51): 2' Fluoro Guanosine
  modified_base (52)..(54): 2'O-Methyl Adenosine
  modified_base (55)..(55): um
  modified_base (56)..(56): 2' Fluoro Guanosine
  modified_base (57)..(57): um
  modified_base (58)..(58): 2' Fluoro Guanosine
  modified_base (58)..(58): 2' Fluoro Guanosine
  modified_base (59)..(59): 2'O-Methyl Adenosine
  modified_base (60)..(60): 2' Fluoro Guanosine
  modified_base (61)..(61): 2'O-Methyl Adenosine
  modified_base (62)..(62): um
  modified_base (63)..(65): 2' Fluoro Guanosine
  modified_base (66)..(67): um
  modified_base (68)..(68): gm
  modified_base (69)..(70): 2'O-Methyl Cytosine
  modified_base (71)..(71): gm
  modified_base (72)..(72): 2'O-Methyl Cytosine
  modified_base (72)..(72): inverted deoxythymidine incorporated at the 3'  end
ccgcgcggaggcuugagguagccguuugucggcuuuuuuuuuugcggugggaaaugugagauggguugccgc

SEQ ID NO: 269 - RNA, 35 nt, Artificial Sequence; identical to SEQ ID NO: 188
  aptamer
  modified_base (1)..(1): gm
  modified_base (2)..(2): 2'O-Methyl Cytosine
  modified_base (3)..(4): gm
  modified_base (5)..(5): um
  modified_base (6)..(8): 2' Fluoro Guanosine
  modified_base (9)..(11): 2'O-Methyl Adenosine
  modified_base (12)..(12): um
  modified_base (13)..(13): 2' Fluoro Guanosine
  modified_base (14)..(14): um
  modified_base (15)..(15): 2' Fluoro Guanosine
  modified_base (16)..(16): 2'O-Methyl Adenosine
  modified_base (17)..(17): 2' Fluoro Guanosine
  modified_base (18)..(18): 2'O-Methyl Adenosine
  modified_base (19)..(19): um
  modified_base (20)..(22): 2' Fluoro Guanosine
  modified_base (23)..(24): um
  modified_base (25)..(25): gm
  modified_base (26)..(27): 2'O-Methyl Cytosine
  modified_base (28)..(28): gm
  modified_base (29)..(29): 2'O-Methyl Cytosine
  modified_base (30)..(30): gm
  modified_base (31)..(32): 2'O-Methyl Cytosine
  modified_base (33)..(33): gm
  modified_base (34)..(34): 2'O-Methyl Adenosine
  modified_base (35)..(35): 2'O-Methyl Cytosine
  misc_feature (35)..(35): The 2'O-Methyl cytosine is attached through the linker 1,3-propanediolspacer to 2'O-Methyl cytosine of SEQ ID NO:371

SEQ ID NO: 270 - RNA, 29 nt, Artificial Sequence
  aptamer
  modified_base (1)..(1): gm
  modified_base (2)..(2): 2'O-Methyl Cytosine
  modified_base (3)..(4): gm
  modified_base (5)..(5): um
  modified_base (6)..(8): 2' Fluoro Guanosine
  modified_base (9)..(11): 2'O-Methyl Adenosine
  modified_base (12)..(12): um
  modified_base (13)..(13): 2' Fluoro Guanosine
  modified_base (14)..(14): um
  modified_base (15)..(15): 2' Fluoro Guanosine
  modified_base (16)..(16): 2'O-Methyl Adenosine
  modified_base (17)..(17): 2' Fluoro Guanosine
  modified_base (18)..(18): 2'O-Methyl Adenosine
  modified_base (19)..(19): um
  modified_base (20)..(22): 2' Fluoro Guanosine
  modified_base (23)..(24): um
  modified_base (25)..(25): gm
  modified_base (26)..(27): 2'O-Methyl Cytosine
  modified_base (28)..(28): gm
  modified_base (29)..(29): 2'O-Methyl Cytosine
  misc_feature (29)..(29): The 2'O-Methyl cytosine is attached through the linker 1,3-propanediolspacer to 2'O-Methyl Guanosine of another nucleotide sequence XCCXAC
  misc_feature (29)..(29): The 2'O-Methyl cytosine is attached through the linker 1,3-propanediolspacer to 2'O-Methyl Guanosine of another nucleotide sequence XCCXAC
gcggugggaaaugugagauggguugccgc

SEQ ID NO: 271 - RNA, 29 nt, Artificial Sequence
  aptamer
  modified_base (1)..(1): gm
  modified_base (2)..(2): 2'O-Methyl Cytosine
  modified_base (3)..(4): gm
  modified_base (5)..(5): um
  modified_base (6)..(8): 2' Fluoro Guanosine
  modified_base (9)..(11): 2'O-Methyl Adenosine
  modified_base (12)..(12): um
  modified_base (13)..(13): 2' Fluoro Guanosine
  modified_base (14)..(14): um
  modified_base (15)..(15): 2' Fluoro Guanosine
  modified_base (16)..(16): 2'O-Methyl Adenosine
  modified_base (17)..(17): 2' Fluoro Guanosine
  modified_base (18)..(18): 2'O-Methyl Adenosine
  modified_base (19)..(19): um
  modified_base (20)..(22): 2' Fluoro Guanosine
  modified_base (23)..(24): um
  modified_base (25)..(25): gm
  modified_base (26)..(27): 2'O-Methyl Cytosine
  modified_base (28)..(28): gm
  modified_base (29)..(29): 2'O-Methyl Cytosine
  misc_feature (29)..(29): The 2'O-Methyl cytosine is attached through the linker Hexaethyleneglycol spacer to 2'O-Methyl Guanosine of another nucleotide sequence XCCXAC
gcggugggaaaugugagauggguugccgc

SEQ ID NO: 272 - RNA, 40 nt, Artificial Sequence; identical to SEQ ID NO: 191
  aptamer
  modified_base (1)..(1): gm
  modified_base (2)..(2): 2'O-Methyl Cytosine
  modified_base (3)..(4): gm
  modified_base (5)..(5): um
  modified_base (6)..(8): 2' Fluoro Guanosine
  modified_base (9)..(11): 2'O-Methyl Adenosine
  modified_base (12)..(12): um
  modified_base (13)..(13): 2' Fluoro Guanosine
  modified_base (14)..(14): um
  modified_base (15)..(15): 2' Fluoro Guanosine
  modified_base (16)..(16): 2'O-Methyl Adenosine
  modified_base (17)..(17): 2' Fluoro Guanosine
  modified_base (18)..(18): 2'O-Methyl Adenosine
  modified_base (19)..(19): um
  modified_base (20)..(22): 2' Fluoro Guanosine
  modified_base (23)..(24): um
  modified_base (25)..(25): gm
  modified_base (26)..(27): 2'O-Methyl Cytosine
  modified_base (28)..(28): gm
  modified_base (29)..(29): 2'O-Methyl Cytosine
  modified_base (30)..(34): 2'O-Methyl deoxyuridine
  misc_feature (30)..(34): 2'O-Methyl deoxyuridine linker
  modified_base (35)..(35): gm
  modified_base (36)..(37): 2'O-Methyl Cytosine
  modified_base (38)..(38): gm
  modified_base (39)..(39): 2'O-Methyl Adenosine
  modified_base (40)..(40): 2'O-Methyl Cytosine
  misc_feature (40)..(40): The 2'O-Methyl cytosine is attached through the linker 1,3-propanediolspacer to 2'O-Methyl cytosine of SEQ ID NO:374

SEQ ID NO: 273 - RNA, 45 nt, Artificial Sequence; identical to SEQ ID NO: 192
  aptamer
  modified_base (1)..(1): gm
  modified_base (2)..(2): 2'O-Methyl Cytosine
  modified_base (3)..(4): gm
  modified_base (5)..(5): um
  modified_base (6)..(8): 2' Fluoro Guanosine
  modified_base (9)..(11): 2'O-Methyl Adenosine
  modified_base (12)..(12): um
  modified_base (13)..(13): 2' Fluoro Guanosine
  modified_base (14)..(14): um
  modified_base (15)..(15): 2' Fluoro Guanosine
  modified_base (16)..(16): 2'O-Methyl Adenosine
  modified_base (17)..(17): 2' Fluoro Guanosine
  modified_base (18)..(18): 2'O-Methyl Adenosine
  modified_base (19)..(19): um
  modified_base (20)..(22): 2' Fluoro Guanosine
  modified_base (23)..(24): um
  modified_base (25)..(25): gm
  modified_base (26)..(27): 2'O-Methyl Cytosine
  modified_base (28)..(28): gm
  modified_base (29)..(29): 2'O-Methyl Cytosine
  modified_base (30)..(39): 2'O-Methyl deoxyuridine
  misc_feature (30)..(39): 2'O-Methyl deoxyuridine linker
  modified_base (40)..(40): gm
  modified_base (41)..(42): 2'O-Methyl Cytosine
  modified_base (43)..(43): gm
  modified_base (44)..(44): 2'O-Methyl Adenosine
  modified_base (45)..(45): 2'O-Methyl Cytosine
  misc_feature (45)..(45): The 2'O-Methyl cytosine is attached through the linker 1,3-propanediolspacer to 2'O-Methyl cytosine of SEQ ID NO:375

SEQ ID NO: 274 - RNA, 64 nt, Artificial Sequence
  aptamer
  misc_feature (1)..(1): The 2'O-Methyl cytosine is attached through the linker 1,3-propanediolspacer to 2'O-Methyl cytosine of another nucleotide sequence CXAC
  modified_base (1)..(2): 2'O-Methyl Cytosine
  modified_base (3)..(3): 2' Fluoro Guanosine
  modified_base (4)..(4): 2'O-Methyl Cytosine
  modified_base (5)..(5): 2' Fluoro Guanosine
  modified_base (6)..(6): 2'O-Methyl Cytosine
  modified_base (7)..(8): 2' Fluoro Guanosine
  modified_base (9)..(9): 2'O-Methyl Adenosine
  modified_base (10)..(11): 2' Fluoro Guanosine
  modified_base (12)..(12): 2'O-Methyl Cytosine
  modified_base (13)..(14): um
  modified_base (15)..(15): 2' Fluoro Guanosine
  modified_base (16)..(16): 2'O-Methyl Adenosine
  modified_base (17)..(18): 2' Fluoro Guanosine
  modified_base (19)..(19): um
  modified_base (20)..(20): 2'O-Methyl Adenosine
  modified_base (21)..(21): 2' Fluoro Guanosine
  modified_base (22)..(23): 2'O-Methyl Cytosine
  modified_base (24)..(24): 2' Fluoro Guanosine
  modified_base (25)..(27): um
  modified_base (28)..(28): um
  modified_base (29)..(29): um
  modified_base (30)..(30): 2'O-Methyl Cytosine
  modified_base (31)..(32): um
  modified_base (33)..(33): 2'O-Methyl Cytosine
  modified_base (34)..(34): um
  modified_base (35)..(35): 2'O-Methyl Cytosine
  modified_base (36)..(37): um
  modified_base (38)..(38): um
  modified_base (39)..(41): 2' Fluoro Guanosine
  modified_base (42)..(44): 2'O-Methyl Adenosine
  modified_base (45)..(45): um
  modified_base (46)..(46): 2' Fluoro Guanosine
  modified_base (47)..(47): um
  modified_base (48)..(48): 2' Fluoro Guanosine
  modified_base (49)..(49): 2'O-Methyl Adenosine
  modified_base (50)..(50): 2' Fluoro Guanosine
  modified_base (51)..(51): 2'O-Methyl Adenosine
  modified_base (52)..(52): um
  modified_base (53)..(55): 2' Fluoro Guanosine
  modified_base (56)..(57): um
  modified_base (58)..(58): um
  modified_base (59)..(60): 2'O-Methyl Cytosine
  modified_base (61)..(61): um
  modified_base (62)..(62): 2'O-Methyl Cytosine
  modified_base (63)..(63): um
  modified_base (64)..(64): inverted deoxythymidine incorporated at the 3'  end
  modified_base (64)..(64): 2'O-Methyl Cytosine
ccgcgcggaggcuugagguagccguuugucggcgcggugggaaaugugagauggguugccgcgc

SEQ ID NO: 275 - RNA, 31 nt, Artificial Sequence; identical to SEQ ID NO: 20
  aptamer
  modified_base (1)..(2): 2'O-Methyl Cytosine
  misc_feature (1)..(1): The 2'O-Methyl cytosine is attached through the linker 1,3-propanediolspacer to 2'O-Methyl cytosine of another nucleotide sequence CXAC
  modified_base (3)..(3): 2' Fluoro Guanosine
  modified_base (4)..(4): 2'O-Methyl Cytosine
  modified_base (5)..(5): 2' Fluoro Guanosine
  modified_base (6)..(6): 2'O-Methyl Cytosine
  modified_base (7)..(8): 2' Fluoro Guanosine
  modified_base (9)..(9): 2'O-Methyl Adenosine
  modified_base (10)..(11): 2' Fluoro Guanosine
  modified_base (12)..(12): 2'O-Methyl Cytosine
  modified_base (13)..(14): um
  modified_base (15)..(15): 2' Fluoro Guanosine
  modified_base (16)..(16): 2'O-Methyl Adenosine
  modified_base (17)..(18): 2' Fluoro Guanosine
  modified_base (19)..(19): um
  modified_base (20)..(20): 2'O-Methyl Adenosine
  modified_base (21)..(21): 2' Fluoro Guanosine
  modified_base (22)..(23): 2'O-Methyl Cytosine
  modified_base (24)..(24): 2' Fluoro Guanosine
  modified_base (25)..(27): um
  modified_base (28)..(28): gm
  modified_base (29)..(29): um
  modified_base (30)..(30): 2'O-Methyl Cytosine
  modified_base (31)..(31): gm
  misc_feature (31)..(31): The 2'O-Methyl Guanosine is attached through the linker 1,3-propanediolspacer to 2'O-Methyl Guanosine of SEQ ID NO:376

SEQ ID NO: 276 - RNA, 31 nt, Artificial Sequence; identical to SEQ ID NO: 20
  aptamer
  modified_base (1)..(2): 2'O-Methyl Cytosine
  misc_feature (1)..(1): The 2'O-Methyl cytosine is attached through the linker 1,3-propanediolspacer to 2'O-Methyl cytosine of another nucleotide sequence CXAC
  modified_base (3)..(3): 2' Fluoro Guanosine
  modified_base (4)..(4): 2'O-Methyl Cytosine
  modified_base (5)..(5): 2' Fluoro Guanosine
  modified_base (6)..(6): 2'O-Methyl Cytosine
  modified_base (7)..(8): 2' Fluoro Guanosine
  modified_base (9)..(9): 2'O-Methyl Adenosine
  modified_base (10)..(11): 2' Fluoro Guanosine
  modified_base (12)..(12): 2'O-Methyl Cytosine
  modified_base (13)..(14): gm
  modified_base (15)..(15): 2' Fluoro Guanosine
  modified_base (16)..(16): 2'O-Methyl Adenosine
  modified_base (17)..(18): 2' Fluoro Guanosine
  modified_base (19)..(19): gm
  modified_base (20)..(20): 2'O-Methyl Adenosine
  modified_base (21)..(21): 2' Fluoro Guanosine
  modified_base (22)..(23): 2'O-Methyl Cytosine
  modified_base (24)..(24): 2' Fluoro Guanosine
  modified_base (25)..(27): gm
  modified_base (28)..(28): gm
  modified_base (29)..(29): gm
  modified_base (30)..(30): 2'O-Methyl Cytosine
  modified_base (31)..(31): gm
  misc_feature (31)..(31): The 2'O-Methyl Guanosine is attached through the linker hexaethylene glycol spacer to 2'O-Methyl Guanosine of SEQ ID:377

SEQ ID NO: 277 - RNA, 69 nt, Artificial Sequence
  aptamer
  modified_base (1)..(2): 2'O-Methyl Cytosine
  misc_feature (1)..(1): The 2'O-Methyl cytosine is attached through the linker 1,3-propanediolspacer to 2'O-Methyl cytosine of another nucleotide sequence CXAC
  modified_base (3)..(3): 2' Fluoro Guanosine
  modified_base (4)..(4): 2'O-Methyl Cytosine
  modified_base (5)..(5): 2' Fluoro Guanosine
  modified_base (6)..(6): 2'O-Methyl Cytosine
  modified_base (7)..(8): 2' Fluoro Guanosine
  modified_base (9)..(9): 2'O-Methyl Adenosine
  modified_base (10)..(11): 2' Fluoro Guanosine
  modified_base (12)..(12): 2'O-Methyl Cytosine
  modified_base (13)..(14): um
  modified_base (15)..(15): 2' Fluoro Guanosine
  modified_base (16)..(16): 2'O-Methyl Adenosine
  modified_base (17)..(18): 2' Fluoro Guanosine
  modified_base (19)..(19): um
  modified_base (20)..(20): 2'O-Methyl Adenosine
  modified_base (21)..(21): 2' Fluoro Guanosine
  modified_base (22)..(23): 2'O-Methyl Cytosine
  modified_base (24)..(24): 2' Fluoro Guanosine
  modified_base (25)..(27): um
  modified_base (28)..(28): gm
  modified_base (29)..(29): um
  modified_base (30)..(30): 2'O-Methyl Cytosine
  modified_base (31)..(31): gm
  modified_base (32)..(36): 2'O-Methyl deoxyuridine
  misc_feature (32)..(36): 2'O-Methyl deoxyuridine linker
  modified_base (37)..(37): gm
  modified_base (38)..(38): 2'O-Methyl Cytosine
  modified_base (39)..(39): gm
  modified_base (40)..(40): 2'O-Methyl Cytosine
  modified_base (41)..(42): gm
  modified_base (43)..(43): um
  modified_base (44)..(46): 2' Fluoro Guanosine
  modified_base (47)..(49): 2'O-Methyl Adenosine
  modified_base (50)..(50): um
  modified_base (51)..(51): 2' Fluoro Guanosine
  modified_base (52)..(52): um
  modified_base (53)..(53): 2' Fluoro Guanosine
  modified_base (54)..(54): 2'O-Methyl Adenosine
  modified_base (55)..(55): 2' Fluoro Guanosine
  modified_base (56)..(56): 2'O-Methyl Adenosine
  modified_base (57)..(57): um
  modified_base (58)..(60): 2' Fluoro Guanosine
  modified_base (61)..(62): um
  modified_base (63)..(63): gm
  modified_base (64)..(65): 2'O-Methyl Cytosine
  modified_base (66)..(66): gm
  modified_base (67)..(67): 2'O-Methyl Cytosine
  modified_base (68)..(68): gm
  modified_base (69)..(69): 2'O-Methyl Cytosine
  modified_base (69)..(69): inverted deoxythymidine incorporated at the 3'  end
ccgcgcggaggcuugagguagccguuugucguuuuugcgcggugggaaaugugagauggguugccgcgc

SEQ ID NO: 278 - RNA, 74 nt, Artificial Sequence
  aptamer
  modified_base (1)..(2): 2'O-Methyl Cytosine
  misc_feature (1)..(1): The 2'O-Methyl cytosine is attached through the linker 1,3-propanediolspacer to 2'O-Methyl cytosine of another nucleotide sequence CXAC
  modified_base (3)..(3): 2' Fluoro Guanosine
  modified_base (4)..(4): 2'O-Methyl Cytosine
  modified_base (5)..(5): 2' Fluoro Guanosine
  modified_base (6)..(6): 2'O-Methyl Cytosine
  modified_base (7)..(8): 2' Fluoro Guanosine
  modified_base (9)..(9): 2'O-Methyl Adenosine
  modified_base (10)..(11): 2' Fluoro Guanosine
  modified_base (12)..(12): 2'O-Methyl Cytosine
  modified_base (13)..(14): um
  modified_base (15)..(15): 2' Fluoro Guanosine
  modified_base (16)..(16): 2'O-Methyl Adenosine
  modified_base (17)..(18): 2' Fluoro Guanosine
  modified_base (19)..(19): um
  modified_base (20)..(20): 2'O-Methyl Adenosine
  modified_base (21)..(21): 2' Fluoro Guanosine
  modified_base (22)..(23): 2'O-Methyl Cytosine
  modified_base (24)..(24): 2' Fluoro Guanosine
  modified_base (25)..(27): um
  modified_base (28)..(28): gm
  modified_base (29)..(29): um
  modified_base (30)..(30): 2'O-Methyl Cytosine
  modified_base (31)..(31): gm
  modified_base (32)..(41): 2'O-Methyl deoxyuridine
  misc_feature (32)..(41): 2'O-Methyl deoxyuridine linker
  modified_base (42)..(42): gm
  modified_base (43)..(43): 2'O-Methyl Cytosine
  modified_base (44)..(44): gm
  modified_base (45)..(45): 2'O-Methyl Cytosine
  modified_base (46)..(47): gm
  modified_base (48)..(48): um
  modified_base (49)..(51): 2' Fluoro Guanosine
  modified_base (52)..(54): 2'O-Methyl Adenosine
  modified_base (55)..(55): um
  modified_base (56)..(56): 2' Fluoro Guanosine
  modified_base (57)..(57): um
  modified_base (58)..(58): 2' Fluoro Guanosine
  modified_base (59)..(59): 2'O-Methyl Adenosine
  modified_base (60)..(60): 2' Fluoro Guanosine
  modified_base (61)..(61): 2'O-Methyl Adenosine
  modified_base (62)..(62): um
  modified_base (63)..(65): 2' Fluoro Guanosine
  modified_base (66)..(67): um
  modified_base (68)..(68): gm
  modified_base (69)..(70): 2'O-Methyl Cytosine
  modified_base (71)..(71): gm
  modified_base (72)..(72): 2'O-Methyl Cytosine
  modified_base (73)..(73): gm
  modified_base (74)..(74): 2'O-Methyl Cytosine
  modified_base (74)..(74): inverted deoxythymidine incorporated at the 3'  end
ccgcgcggaggcuugagguagccguuugucguuuuuuuuuugcgcggugggaaaugugagauggguugccgcgc

SEQ ID NO: 279 - RNA, 33 nt, Artificial Sequence; identical to SEQ ID NO: 178
  aptamer
  modified_base (1)..(1): gm
  modified_base (2)..(2): 2'O-Methyl Cytosine
  modified_base (3)..(4): gm
  modified_base (5)..(5): um
  modified_base (6)..(8): 2' Fluoro Guanosine
  modified_base (9)..(11): 2'O-Methyl Adenosine
  modified_base (12)..(12): um
  modified_base (13)..(13): 2' Fluoro Guanosine
  modified_base (14)..(14): um
  modified_base (15)..(15): 2' Fluoro Guanosine
  modified_base (16)..(16): 2'O-Methyl Adenosine
  modified_base (17)..(17): 2' Fluoro Guanosine
  modified_base (18)..(18): 2'O-Methyl Adenosine
  modified_base (19)..(19): um
  modified_base (20)..(22): 2' Fluoro Guanosine
  modified_base (23)..(24): um
  modified_base (25)..(25): gm
  modified_base (26)..(27): 2'O-Methyl Cytosine
  modified_base (28)..(28): gm
  modified_base (29)..(30): 2'O-Methyl Cytosine
  modified_base (31)..(31): gm
  modified_base (32)..(32): 2'O-Methyl Adenosine
  modified_base (33)..(33): 2'O-Methyl Cytosine
  misc_feature (33)..(33): The 2'O-Methyl cytosine is attached through the linker 1,3-propanediolspacer to 2'O-Methyl cytosine of SEQ ID NO:378

SEQ ID NO: 280 - RNA, 33 nt, Artificial Sequence; identical to SEQ ID NO: 193
  aptamer
  modified_base (1)..(1): gm
  modified_base (2)..(2): 2'O-Methyl Cytosine
  modified_base (3)..(3): gm
  modified_base (4)..(4): 2'O-Methyl Cytosine
  modified_base (5)..(6): gm
  modified_base (7)..(7): um
  modified_base (8)..(10): 2' Fluoro Guanosine
  modified_base (11)..(13): 2'O-Methyl Adenosine
  modified_base (14)..(14): um
  modified_base (15)..(15): 2' Fluoro Guanosine
  modified_base (16)..(16): um
  modified_base (17)..(17): 2' Fluoro Guanosine
  modified_base (18)..(18): 2'O-Methyl Adenosine
  modified_base (19)..(19): 2' Fluoro Guanosine
  modified_base (20)..(20): 2'O-Methyl Adenosine
  modified_base (21)..(21): um
  modified_base (22)..(24): 2' Fluoro Guanosine
  modified_base (25)..(26): um
  modified_base (27)..(27): gm
  modified_base (28)..(29): 2'O-Methyl Cytosine
  modified_base (30)..(30): gm
  modified_base (31)..(31): 2'O-Methyl Cytosine
  modified_base (32)..(32): gm
  modified_base (33)..(33): 2'O-Methyl Cytosine
  misc_feature (33)..(33): The 2'O-Methyl cytosine is attached through the linker 1,3-propanediolspacer to 2'O-Methyl cytosine of another nucleotide sequence CXAC

SEQ ID NO: 281 - RNA, 33 nt, Artificial Sequence; identical to SEQ ID NO: 193
  aptamer
  modified_base (1)..(1): gm
  modified_base (2)..(2): 2'O-Methyl Cytosine
  modified_base (3)..(3): gm
  modified_base (4)..(4): 2'O-Methyl Cytosine
  modified_base (5)..(6): gm
  modified_base (7)..(7): um
  modified_base (8)..(10): 2' Fluoro Guanosine
  modified_base (11)..(13): 2'O-Methyl Adenosine
  modified_base (14)..(14): um
  modified_base (15)..(15): 2' Fluoro Guanosine
  modified_base (16)..(16): um
  modified_base (17)..(17): 2' Fluoro Guanosine
  modified_base (18)..(18): 2'O-Methyl Adenosine
  modified_base (19)..(19): 2' Fluoro Guanosine
  modified_base (20)..(20): 2'O-Methyl Adenosine
  modified_base (21)..(21): um
  modified_base (22)..(24): 2' Fluoro Guanosine
  modified_base (25)..(26): um
  modified_base (27)..(27): gm
  modified_base (28)..(29): 2'O-Methyl Cytosine
  modified_base (30)..(30): gm
  modified_base (31)..(31): 2'O-Methyl Cytosine
  modified_base (32)..(32): gm
  modified_base (33)..(33): 2'O-Methyl Cytosine
  misc_feature (33)..(33): The 2'O-Methyl cytosine is attached through the linker Hexaethyleneglycol spacer to 2'O-Methyl cytosine of another nucleotide sequence CXAC

SEQ ID NO: 282 - RNA, 47 nt, Artificial Sequence; identical to SEQ ID NO: 160
  aptamer
  modified_base (1)..(2): gm
  modified_base (3)..(3): 2'O-Methyl Cytosine
  modified_base (4)..(4): gm
  modified_base (5)..(5): 2'O-Methyl Cytosine
  modified_base (6)..(6): gm
  modified_base (7)..(7): 2'O-Methyl Adenosine
  modified_base (8)..(8): 2'O-Methyl Cytosine
  modified_base (9)..(10): gm
  modified_base (11)..(11): um
  modified_base (12)..(12): 2'O-Methyl Adenosine
  modified_base (14)..(14): 2'O-Methyl Adenosine
  modified_base (15)..(16): um
  modified_base (17)..(17): 2'O-Methyl Adenosine
  modified_base (18)..(18): um
  modified_base (22)..(22): 2'O-Methyl Cytosine
  modified_base (23)..(23): 2'O-Methyl Adenosine
  modified_base (24)..(24): 2' Fluoro Guanosine
  modified_base (25)..(25): um
  modified_base (26)..(26): 2' Fluoro Guanosine
  modified_base (27)..(27): um
  modified_base (28)..(28): 2' Fluoro Guanosine
  modified_base (29)..(29): 2'O-Methyl Adenosine
  modified_base (30)..(31): 2'O-Methyl Cytosine
  modified_base (32)..(32): gm
  modified_base (33)..(33): 2'O-Methyl Cytosine
  modified_base (34)..(34): gm
  modified_base (35)..(36): 2'O-Methyl Cytosine
  modified_base (37)..(37): gm
  modified_base (38)..(38): 2'O-Methyl Cytosine
  modified_base (39)..(43): 2'O-Methyl deoxyuridine
  misc_feature (39)..(43): 2'O-Methyl deoxyuridine linker
  modified_base (44)..(44): 2'O-Methyl Cytosine
  modified_base (45)..(45): gm
  modified_base (46)..(46): 2'O-Methyl Adenosine
  modified_base (47)..(47): 2'O-Methyl Cytosine
  misc_feature (47)..(47): The 2'O-Methyl cytosine is attached through the linker 1,3-propanediolspacer to 2'O-Methyl cytosine of SEQ ID NO:381

SEQ ID NO: 283 - RNA, 47 nt, Artificial Sequence; identical to SEQ ID NO: 203
  aptamer
  modified_base (1)..(1): gm
  modified_base (2)..(2): 2'O-Methyl Cytosine
  modified_base (3)..(3): gm
  modified_base (4)..(4): 2'O-Methyl Cytosine
  modified_base (5)..(6): gm
  modified_base (7)..(7): um
  modified_base (8)..(10): 2' Fluoro Guanosine
  modified_base (11)..(13): 2'O-Methyl Adenosine
  modified_base (14)..(14): um
  modified_base (15)..(15): 2' Fluoro Guanosine
  modified_base (16)..(16): um
  modified_base (17)..(17): 2' Fluoro Guanosine
  modified_base (18)..(18): 2'O-Methyl Adenosine
  modified_base (19)..(19): 2' Fluoro Guanosine
  modified_base (20)..(20): 2'O-Methyl Adenosine
  modified_base (21)..(21): um
  modified_base (22)..(24): 2' Fluoro Guanosine
  modified_base (25)..(26): um
  modified_base (27)..(27): gm
  modified_base (28)..(29): 2'O-Methyl Cytosine
  modified_base (30)..(30): gm
  modified_base (31)..(31): 2'O-Methyl Cytosine
  modified_base (32)..(32): gm
  modified_base (33)..(33): 2'O-Methyl Cytosine
  modified_base (34)..(43): 2'O-Methyl deoxyuridine
  misc_feature (34)..(43): 2'O-Methyl deoxyuridine linker
  modified_base (44)..(44): 2'O-Methyl Cytosine
  modified_base (45)..(45): gm
  modified_base (46)..(46): 2'O-Methyl Adenosine
  modified_base (47)..(47): 2'O-Methyl Cytosine
  misc_feature (47)..(47): The 2'O-Methyl cytosine is attached through the linker 1,3-propanediolspacer to 2'O-Methyl cytosine of SEQ ID NO:382

SEQ ID NO: 284 - RNA, 66 nt, Artificial Sequence
  aptamer
  modified_base (1)..(2): 2'O-Methyl Cytosine
  misc_feature (1)..(1): The 2'O-Methyl cytosine is attached through the linker 1,3-propanediolspacer to 2'O-Methyl cytosine of another nucleotide sequence XCCXAC
  modified_base (3)..(3): 2' Fluoro Guanosine
  modified_base (4)..(4): 2'O-Methyl Cytosine
  modified_base (5)..(5): 2' Fluoro Guanosine
  modified_base (6)..(6): 2'O-Methyl Cytosine
  modified_base (7)..(8): 2' Fluoro Guanosine
  modified_base (9)..(9): 2'O-Methyl Adenosine
  modified_base (10)..(11): 2' Fluoro Guanosine
  modified_base (12)..(12): 2'O-Methyl Cytosine
  modified_base (13)..(14): um
  modified_base (15)..(15): 2' Fluoro Guanosine
  modified_base (16)..(16): 2'O-Methyl Adenosine
  modified_base (17)..(18): 2' Fluoro Guanosine
  modified_base (19)..(19): um
  modified_base (20)..(20): 2'O-Methyl Adenosine
  modified_base (21)..(21): 2' Fluoro Guanosine
  modified_base (22)..(23): 2'O-Methyl Cytosine
  modified_base (24)..(24): 2' Fluoro Guanosine
  modified_base (25)..(27): um
  modified_base (28)..(28): gm
  modified_base (29)..(29): um
  modified_base (30)..(30): 2'O-Methyl Cytosine
  modified_base (31)..(32): gm
  modified_base (33)..(33): 2'O-Methyl Cytosine
  modified_base (34)..(34): gm
  modified_base (35)..(35): 2'O-Methyl Cytosine
  modified_base (36)..(36): gm
  modified_base (37)..(37): 2'O-Methyl Cytosine
  modified_base (38)..(39): gm
  modified_base (40)..(40): um
  modified_base (41)..(43): 2' Fluoro Guanosine
  modified_base (44)..(46): 2'O-Methyl Adenosine
  modified_base (47)..(47): um
  modified_base (48)..(48): 2' Fluoro Guanosine
  modified_base (49)..(49): um
  modified_base (50)..(50): 2' Fluoro Guanosine
  modified_base (51)..(51): 2'O-Methyl Adenosine
  modified_base (52)..(52): 2' Fluoro Guanosine
  modified_base (53)..(53): 2'O-Methyl Adenosine
  modified_base (54)..(54): um
  modified_base (55)..(57): 2' Fluoro Guanosine
  modified_base (58)..(59): um
  modified_base (60)..(60): gm
  modified_base (61)..(62): 2'O-Methyl Cytosine
  modified_base (63)..(63): gm
  modified_base (64)..(64): 2'O-Methyl Cytosine
  modified_base (65)..(65): gm
  modified_base (66)..(66): 2'O-Methyl Cytosine
  modified_base (66)..(66): inverted deoxythymidine incorporated at the 3'  end
ccgcgcggaggcuugagguagccguuugucggcgcgcggugggaaaugugagauggguugccgcgc

SEQ ID NO: 285 - RNA, 33 nt, Artificial Sequence; identical to SEQ ID NO: 152
  aptamer
  modified_base (1)..(2): 2'O-Methyl Cytosine
  misc_feature (1)..(1): The 2'O-Methyl cytosine is attached through the linker 1,3-propanediolspacer to 2'O-Methyl cytosine of another nucleotide sequence XCCXAC
  modified_base (3)..(3): 2' Fluoro Guanosine
  modified_base (4)..(4): 2'O-Methyl Cytosine
  modified_base (5)..(5): 2' Fluoro Guanosine
  modified_base (6)..(6): 2'O-Methyl Cytosine
  modified_base (7)..(8): 2' Fluoro Guanosine
  modified_base (9)..(9): 2'O-Methyl Adenosine
  modified_base (10)..(11): 2' Fluoro Guanosine
  modified_base (12)..(12): 2'O-Methyl Cytosine
  modified_base (13)..(14): um
  modified_base (15)..(15): 2' Fluoro Guanosine
  modified_base (16)..(16): 2'O-Methyl Adenosine
  modified_base (17)..(18): 2' Fluoro Guanosine
  modified_base (19)..(19): um
  modified_base (20)..(20): 2'O-Methyl Adenosine
  modified_base (21)..(21): 2' Fluoro Guanosine
  modified_base (22)..(23): 2'O-Methyl Cytosine
  modified_base (24)..(24): 2' Fluoro Guanosine
  modified_base (25)..(27): um
  modified_base (28)..(28): gm
  modified_base (29)..(29): um
  modified_base (30)..(30): 2'O-Methyl Cytosine
  modified_base (31)..(32): gm
  modified_base (33)..(33): 2'O-Methyl Cytosine
  misc_feature (33)..(33): The 2'O-Methyl cytosine is attached through the linker 1,3-propanediolspacer to 2'O-Methyl Guanosine of SEQ ID NO:383

SEQ ID NO: 286 - RNA, 33 nt, Artificial Sequence; identical to SEQ ID NO: 152
  aptamer
  modified_base (1)..(2): 2'O-Methyl Cytosine
  misc_feature (1)..(1): The 2'O-Methyl cytosine is attached through the linker 1,3-propanediolspacer to 2'O-Methyl cytosine of another nucleotide sequence XCCXAC
  modified_base (3)..(3): 2' Fluoro Guanosine
  modified_base (4)..(4): 2'O-Methyl Cytosine
  modified_base (5)..(5): 2' Fluoro Guanosine
  modified_base (6)..(6): 2'O-Methyl Cytosine
  modified_base (7)..(8): 2' Fluoro Guanosine
  modified_base (9)..(9): 2'O-Methyl Adenosine
  modified_base (10)..(11): 2' Fluoro Guanosine
  modified_base (12)..(12): 2'O-Methyl Cytosine
  modified_base (13)..(14): um
  modified_base (15)..(15): 2' Fluoro Guanosine
  modified_base (16)..(16): 2'O-Methyl Adenosine
  modified_base (18)..(18): 2' Fluoro Guanosine
  modified_base (19)..(19): um
  modified_base (20)..(20): 2'O-Methyl Adenosine
  modified_base (21)..(21): 2' Fluoro Guanosine
  modified_base (22)..(23): 2'O-Methyl Cytosine
  modified_base (24)..(24): 2' Fluoro Guanosine
  modified_base (25)..(27): um
  modified_base (28)..(28): gm
  modified_base (29)..(29): um
  modified_base (30)..(30): 2'O-Methyl Cytosine
  modified_base (31)..(32): gm
  modified_base (33)..(33): 2'O-Methyl Cytosine
  misc_feature (33)..(33): The 2'O-Methyl cytosine is attached through the linker hexaethylene glycol spacer to 2'O-Methyl Guanosine of SEQ ID:384

SEQ ID NO: 287 - RNA, 71 nt, Artificial Sequence
  aptamer
  modified_base (1)..(2): 2'O-Methyl Cytosine
  misc_feature (1)..(1): The 2'O-Methyl cytosine is attached through the linker 1,3-propanediolspacer to 2'O-Methyl cytosine of another nucleotide sequence XCCXAC
  modified_base (3)..(3): 2' Fluoro Guanosine
  modified_base (4)..(4): 2'O-Methyl Cytosine
  modified_base (5)..(5): 2' Fluoro Guanosine
  modified_base (6)..(6): 2'O-Methyl Cytosine
  modified_base (7)..(8): 2' Fluoro Guanosine
  modified_base (9)..(9): 2'O-Methyl Adenosine
  modified_base (10)..(11): 2' Fluoro Guanosine
  modified_base (12)..(12): 2'O-Methyl Cytosine
  modified_base (12)..(14): um
  modified_base (15)..(15): 2' Fluoro Guanosine
  modified_base (16)..(16): 2'O-Methyl Adenosine
  modified_base (17)..(18): 2' Fluoro Guanosine
  modified_base (19)..(19): um
  modified_base (20)..(20): 2'O-Methyl Adenosine
  modified_base (21)..(21): 2' Fluoro Guanosine
  modified_base (22)..(23): 2'O-Methyl Cytosine
  modified_base (24)..(24): 2' Fluoro Guanosine
  modified_base (25)..(27): um
  modified_base (28)..(28): gm
  modified_base (29)..(29): um
  modified_base (30)..(30): 2'O-Methyl Cytosine
  modified_base (31)..(32): gm
  modified_base (33)..(33): 2'O-Methyl Cytosine
  modified_base (34)..(38): 2'O-Methyl deoxyuridine
  misc_feature (34)..(38): 2'O-Methyl deoxyuridine linker
  modified_base (39)..(39): gm
  modified_base (40)..(40): 2'O-Methyl Cytosine
  modified_base (41)..(41): gm
  modified_base (42)..(42): 2'O-Methyl Cytosine
  modified_base (43)..(44): gm
  modified_base (45)..(45): um
  modified_base (46)..(48): 2' Fluoro Guanosine
  modified_base (49)..(51): 2'O-Methyl Adenosine
  modified_base (52)..(52): um
  modified_base (53)..(53): 2' Fluoro Guanosine
  modified_base (54)..(54): um
  modified_base (55)..(55): 2' Fluoro Guanosine
  modified_base (56)..(56): 2'O-Methyl Adenosine
  modified_base (57)..(57): 2' Fluoro Guanosine
  modified_base (58)..(58): 2'O-Methyl Adenosine
  modified_base (59)..(59): um
  modified_base (60)..(62): 2' Fluoro Guanosine
  modified_base (63)..(64): um
  modified_base (66)..(67): 2'O-Methyl Cytosine
  modified_base (69)..(69): 2'O-Methyl Cytosine
  modified_base (71)..(71): 2'O-Methyl Cytosine
  modified_base (71)..(71): inverted deoxythymidine incorporated at the 3'  end
ccgcgcggaggcuugagguagccguuugucggcuuuuugcgcggugggaaaugugagauggguugccgcgc

SEQ ID NO: 288 - RNA, 76 nt, Artificial Sequence
  aptamer
  modified_base (1)..(2): 2'O-Methyl Cytosine
  misc_feature (1)..(1): The 2'O-Methyl cytosine is attached through the linker 1,3-propanediolspacer to 2'O-Methyl cytosine of another nucleotide sequence XCCXAC
  modified_base (3)..(3): 2' Fluoro Guanosine
  modified_base (4)..(4): 2'O-Methyl Cytosine
  modified_base (5)..(5): 2' Fluoro Guanosine
  modified_base (6)..(6): 2'O-Methyl Cytosine
  modified_base (7)..(8): 2' Fluoro Guanosine
  modified_base (9)..(9): 2'O-Methyl Adenosine
  modified_base (10)..(11): 2' Fluoro Guanosine
  modified_base (12)..(12): 2'O-Methyl Cytosine
  modified_base (13)..(14): um
  modified_base (15)..(15): 2' Fluoro Guanosine
  modified_base (16)..(16): 2'O-Methyl Adenosine
  modified_base (17)..(18): 2' Fluoro Guanosine
  modified_base (19)..(19): um
  modified_base (20)..(20): 2'O-Methyl Adenosine
  modified_base (21)..(21): 2' Fluoro Guanosine
  modified_base (22)..(23): 2'O-Methyl Cytosine
  modified_base (24)..(24): 2' Fluoro Guanosine
  modified_base (25)..(27): um
  modified_base (28)..(28): gm
  modified_base (29)..(29): um
  modified_base (30)..(30): 2'O-Methyl Cytosine
  modified_base (31)..(32): gm
  modified_base (33)..(33): 2'O-Methyl Cytosine
  modified_base (34)..(43): 2'O-Methyl deoxyuridine
  misc_feature (34)..(43): 2'O-Methyl deoxyuridine linker
  modified_base (44)..(44): gm
  modified_base (45)..(45): 2'O-Methyl Cytosine
  modified_base (46)..(46): gm
  modified_base (47)..(47): 2'O-Methyl Cytosine
  modified_base (48)..(49): gm
  modified_base (50)..(50): um
  modified_base (51)..(53): 2' Fluoro Guanosine
  modified_base (54)..(56): 2'O-Methyl Adenosine
  modified_base (57)..(57): um
  modified_base (58)..(58): 2' Fluoro Guanosine
  modified_base (59)..(59): um
  modified_base (60)..(60): 2' Fluoro Guanosine
  modified_base (61)..(61): 2'O-Methyl Adenosine
  modified_base (62)..(62): 2' Fluoro Guanosine
  modified_base (63)..(63): 2'O-Methyl Adenosine
  modified_base (64)..(64): um
  modified_base (65)..(67): 2' Fluoro Guanosine
  modified_base (68)..(69): um
  modified_base (70)..(70): gm
  modified_base (71)..(72): 2'O-Methyl Cytosine
  modified_base (73)..(73): gm
  modified_base (74)..(74): 2'O-Methyl Cytosine
  modified_base (75)..(75): gm
  modified_base (76)..(76): 2'O-Methyl Cytosine
  modified_base (76)..(76): inverted deoxythymidine incorporated at the 3'  end
ccgcgcggaggcuugagguagccguuugucggcuuuuuuuuuugcgcggugggaaaugugagauggguugccgcgc

SEQ ID NO: 289 - RNA, 39 nt, Artificial Sequence; identical to SEQ ID NO: 209
  aptamer
  modified_base (1)..(1): gm
  modified_base (2)..(2): 2'O-Methyl Cytosine
  modified_base (3)..(3): gm
  modified_base (4)..(4): 2'O-Methyl Cytosine
  modified_base (5)..(6): gm
  modified_base (7)..(7): um
  modified_base (8)..(10): 2' Fluoro Guanosine
  modified_base (11)..(13): 2'O-Methyl Adenosine
  modified_base (14)..(14): um
  modified_base (15)..(15): 2' Fluoro Guanosine
  modified_base (16)..(16): um
  modified_base (17)..(17): 2' Fluoro Guanosine
  modified_base (18)..(18): 2'O-Methyl Adenosine
  modified_base (19)..(19): 2' Fluoro Guanosine
  modified_base (20)..(20): 2'O-Methyl Adenosine
  modified_base (21)..(21): um
  modified_base (22)..(24): 2' Fluoro Guanosine
  modified_base (25)..(26): um
  modified_base (27)..(27): gm
  modified_base (28)..(29): 2'O-Methyl Cytosine
  modified_base (30)..(30): gm
  modified_base (31)..(31): 2'O-Methyl Cytosine
  modified_base (32)..(32): gm
  modified_base (33)..(33): 2'O-Methyl Cytosine
  modified_base (34)..(34): gm
  modified_base (35)..(36): 2'O-Methyl Cytosine
  modified_base (37)..(37): gm
  modified_base (38)..(38): 2'O-Methyl Adenosine
  modified_base (39)..(39): 2'O-Methyl Cytosine
  misc_feature (39)..(39): The 2'O-Methyl cytosine is attached through the linker 1,3-propanediolspacer to 2'O-Methyl cytosine of SEQ ID NO:385

SEQ ID NO: 290 - RNA, 39 nt, Artificial Sequence; identical to SEQ ID NO: 209
  aptamer
  modified_base (1)..(1): gm
  modified_base (2)..(2): 2'O-Methyl Cytosine
  modified_base (3)..(3): gm
  modified_base (4)..(4): 2'O-Methyl Cytosine
  modified_base (5)..(6): gm
  modified_base (7)..(7): um
  modified_base (8)..(10): 2' Fluoro Guanosine
  modified_base (11)..(13): 2'O-Methyl Adenosine
  modified_base (14)..(14): um
  modified_base (15)..(15): 2' Fluoro Guanosine
  modified_base (16)..(16): um
  modified_base (17)..(17): 2' Fluoro Guanosine
  modified_base (18)..(18): 2'O-Methyl Adenosine
  modified_base (19)..(19): 2' Fluoro Guanosine
  modified_base (20)..(20): 2'O-Methyl Adenosine
  modified_base (21)..(21): um
  modified_base (22)..(24): 2' Fluoro Guanosine
  modified_base (25)..(26): um
  modified_base (27)..(27): gm
  modified_base (28)..(29): 2'O-Methyl Cytosine
  modified_base (30)..(30): gm
  modified_base (31)..(31): 2'O-Methyl Cytosine
  modified_base (32)..(32): gm
  modified_base (33)..(33): 2'O-Methyl Cytosine
  modified_base (34)..(34): gm
  modified_base (35)..(36): 2'O-Methyl Cytosine
  modified_base (37)..(37): gm
  modified_base (38)..(38): 2'O-Methyl Adenosine
  modified_base (39)..(39): 2'O-Methyl Cytosine
  misc_feature (39)..(39): The 2'O-Methyl cytosine is attached through the linker 1,3-propanediolspacer to 2'O-Methyl cytosine of SEQ ID NO:386

SEQ ID NO: 291 - RNA, 39 nt, Artificial Sequence; identical to SEQ ID NO: 209
  aptamer
  modified_base (1)..(1): gm
  modified_base (2)..(2): 2'O-Methyl Cytosine
  modified_base (3)..(3): gm
  modified_base (4)..(4): 2'O-Methyl Cytosine
  modified_base (5)..(6): gm
  modified_base (7)..(7): um
  modified_base (8)..(10): 2' Fluoro Guanosine
  modified_base (11)..(13): 2'O-Methyl Adenosine
  modified_base (14)..(14): um
  modified_base (15)..(15): 2' Fluoro Guanosine
  modified_base (16)..(16): um
  modified_base (17)..(17): 2' Fluoro Guanosine
  modified_base (18)..(18): 2'O-Methyl Adenosine
  modified_base (19)..(19): 2' Fluoro Guanosine
  modified_base (20)..(20): 2'O-Methyl Adenosine
  modified_base (21)..(21): um
  modified_base (22)..(24): 2' Fluoro Guanosine
  modified_base (25)..(26): um
  modified_base (27)..(27): gm
  modified_base (28)..(29): 2'O-Methyl Cytosine
  modified_base (30)..(30): gm
  modified_base (31)..(31): 2'O-Methyl Cytosine
  modified_base (32)..(32): gm
  modified_base (33)..(33): 2'O-Methyl Cytosine
  modified_base (34)..(34): gm
  modified_base (35)..(36): 2'O-Methyl Cytosine
  modified_base (37)..(37): gm
  modified_base (38)..(38): 2'O-Methyl Adenosine
  modified_base (39)..(39): 2'O-Methyl Cytosine
  misc_feature (39)..(39): The 2'O-Methyl cytosine is attached through the linker 1,3-propanediolspacer to 2'O-Methyl cytosine of SEQ ID NO:387

SEQ ID NO: 292 - RNA, 44 nt, Artificial Sequence; identical to SEQ ID NO: 212
  aptamer
  modified_base (1)..(1): gm
  modified_base (2)..(2): 2'O-Methyl Cytosine
  modified_base (3)..(3): gm
  modified_base (4)..(4): 2'O-Methyl Cytosine
  modified_base (5)..(6): gm
  modified_base (7)..(7): um
  modified_base (8)..(10): 2' Fluoro Guanosine
  modified_base (11)..(13): 2'O-Methyl Adenosine
  modified_base (14)..(14): um
  modified_base (15)..(15): 2' Fluoro Guanosine
  modified_base (16)..(16): um
  modified_base (17)..(17): 2' Fluoro Guanosine
  modified_base (18)..(18): 2'O-Methyl Adenosine
  modified_base (19)..(19): 2' Fluoro Guanosine
  modified_base (20)..(20): 2'O-Methyl Adenosine
  modified_base (21)..(21): um
  modified_base (22)..(24): 2' Fluoro Guanosine
  modified_base (25)..(26): um
  modified_base (27)..(27): gm
  modified_base (28)..(29): 2'O-Methyl Cytosine
  modified_base (30)..(30): gm
  modified_base (31)..(31): 2'O-Methyl Cytosine
  modified_base (32)..(32): gm
  modified_base (33)..(33): 2'O-Methyl Cytosine
  modified_base (34)..(38): 2'O-Methyl deoxyuridine
  misc_feature (34)..(38): 2'O-Methyl deoxyuridine linker
  modified_base (39)..(39): gm
  modified_base (40)..(41): 2'O-Methyl Cytosine
  modified_base (42)..(42): gm
  modified_base (43)..(43): 2'O-Methyl Adenosine
  modified_base (44)..(44): 2'O-Methyl Cytosine
  misc_feature (44)..(44): The 2'O-Methyl cytosine is attached through the linker 1,3-propanediolspacer to 2'O-Methyl cytosine of SEQ ID NO:388

SEQ ID NO: 293 - RNA, 49 nt, Artificial Sequence; identical to SEQ ID NO: 213
  aptamer
  modified_base (1)..(1): gm
  modified_base (2)..(2): 2'O-Methyl Cytosine
  modified_base (3)..(3): gm
  modified_base (4)..(4): 2'O-Methyl Cytosine
  modified_base (5)..(6): gm
  modified_base (7)..(7): um
  modified_base (8)..(10): 2' Fluoro Guanosine
  modified_base (11)..(13): 2'O-Methyl Adenosine
  modified_base (14)..(14): um
  modified_base (15)..(15): 2' Fluoro Guanosine
  modified_base (16)..(16): um
  modified_base (17)..(17): 2' Fluoro Guanosine
  modified_base (18)..(18): 2'O-Methyl Adenosine
  modified_base (19)..(19): 2' Fluoro Guanosine
  modified_base (20)..(20): 2'O-Methyl Adenosine
  modified_base (21)..(21): um
  modified_base (22)..(24): 2' Fluoro Guanosine
  modified_base (25)..(26): um
  modified_base (27)..(27): gm
  modified_base (28)..(29): 2'O-Methyl Cytosine
  modified_base (30)..(30): gm
  modified_base (31)..(31): 2'O-Methyl Cytosine
  modified_base (32)..(32): gm
  modified_base (33)..(33): 2'O-Methyl Cytosine
  modified_base (34)..(43): 2'O-Methyl deoxyuridine
  misc_feature (34)..(43): 2'O-Methyl deoxyuridine linker
  modified_base (44)..(44): gm
  modified_base (45)..(46): 2'O-Methyl Cytosine
  modified_base (47)..(47): gm
  modified_base (48)..(48): 2'O-Methyl Adenosine
  modified_base (49)..(49): 2'O-Methyl Cytosine
  misc_feature (49)..(49): The 2'O-Methyl cytosine is attached through the linker 1,3-propanediolspacer to 2'O-Methyl cytosine of SEQ ID NO:389

SEQ ID NO: 294 - protein, 206 aa, Artificial Sequence
  aptamer
APMAEGGGQNHHEVVKFMDVYQRSYCHPIETLVDIFQEYPDEIEYIFKPSCVPLMRCGGCCNDEGLECVPTEESNITMQIMRIKPHQGQHIGEMSFLQHNKCECRPKKDRARQEKKSVRGKGKGQKRKRKKSRYKSWSVYVGARCCLMPWSLPGPHPCGPCSERRKHLFVQDPQTCKCSCKNTDSRCKARQLELNERTCRCDKPRR

SEQ ID NO: 295 - protein, 189 aa, Artificial Sequence
  aptamer
APMAEGGGQNHHEVVKFMDVYQRSYCHPIETLVDIFQEYPDEIEYIFKPSCVPLMRCGGCCNDEGLECVPTEESNITMQIMRIKPHQGQHIGEMSFLQHNKCECRPKKDRARQEKKSVRGKGKGQKRKRKKSRYKSWSVPCGPCSERRKHLFVQDPQTCKCSCKNTDSRCKARQLELNERTCRCDKPRR

SEQ ID NO: 296 - protein, 165 aa, Artificial Sequence
  aptamer
APMAEGGGQNHHEVVKFMDVYQRSYCHPIETLVDIFQEYPDEIEYIFKPSCVPLMRCGGCCNDEGLECVPTEESNITMQIMRIKPHQGQHIGEMSFLQHNKCECRPKKDRARQENPCGPCSERRKHLFVQDPQTCKCSCKNTDSRCKARQLELNERTCRCDKPRR

SEQ ID NO: 297 - protein, 121 aa, Artificial Sequence
  aptamer
APMAEGGGQNHHEVVKFMDVYQRSYCHPIETLVDIFQEYPDEIEYIFKPSCVPLMRCGGCCNDEGLECVPTEESNITMQIMRIKPHQGQHIGEMSFLQHNKCECRPKKDRARQEKCDKPRR

SEQ ID NO: 298 - protein, 110 aa, Artificial Sequence
  human VEGF-A110
APMAEGGGQNHHEVVKFMDVYQRSYCHPIETLVDIFQEYPDEIEYIFKPSCVPLMRCGGCCNDEGLECVPTEESNITMQIMRIKPHQGQHIGEMSFLQHNKCECRPKKDR

SEQ ID NO: 299 - protein, 77 aa, Artificial Sequence
  human IL878
AVLPRSAKELRCQCIKTYSKPFHPKFIKELRVIESGPHCANTEIIVKLSDGRELCLDPKENWVQRVVEKFLKRAENS

SEQ ID NO: 300 - protein, 72 aa, Artificial Sequence
  human IL872
SAKELRCQCIKTYSKPFHPKFIKELRVIESGPHCANTEIIVKLSDGRELCLDPKENWVQRVVEKFLKRAENS

SEQ ID NO: 301 - protein, 478 aa, Artificial Sequence
  human Ang2
YNNFRKSMDSIGKKQYQVQHGSCSYTFLLPEMDNCRSSSSPYVSNAVQRDAPLEYDDSVQRLQVLENIMENNTQWLMKLENYIQDNMKKEMVEIQQNAVQNQTAVMIEIGTNLLNQTAEQTRKLTDVEAQVLNQTTRLELQLLEHSLSTNKLEKQILDQTSEINKLQDKNSFLEKKVLAMEDKHIIQLQSIKEEKDQLQVLVSKQNSIIEELEKKIVTATVNNSVLQKQQHDLMETVNNLLTMMSTSNSAKDPTVAKEEQISFRDCAEVFKSGHTTNGIYTLTFPNSTEEIKAYCDMEAGGGGWTIIQRREDGSVDFQRTWKEYKVGFGNPSGEYWLGNEFVSQLTNQQRYVLKIHLKDWEGNEAYSLYEHFYLSSEELNYRIHLKGLTGTAGKISSISQPGNDFSTKDGDNDKCICKCSQMLTGGWWFDACGPSNLNGMYYPQRQNTNKFNGIKWYYWKGSGYSLKATTMMIRPADF

SEQ ID NO: 302 - RNA, 33 nt, Artificial Sequence; identical to SEQ ID NO: 152
  Aptamer
  modified_base (1)..(2): 2'O-Methyl Cytosine
  misc_feature (1)..(1): The 2'O-Methyl cytosine is attached through the linker 1,3-propanediolspacer to 2'O-Methyl cytosine of SEQ ID NO:73
  misc_feature (1)..(1): The 2'O-Methyl cytosine is attached through the linker 1,3-propanediolspacer to 2'O-Methyl cytosine of another nucleotide sequence XCCXAC
  misc_feature (1)..(1): The 2'O-Methyl cytosine is attached through the linker 1,3-propanediolspacer to 2'O-Methyl cytosine of SEQ ID NO:76
  misc_feature (1)..(1): The 2'O-Methyl cytosine is attached through the linker 1,3-propanediolspacer to 2'O-Methyl cytosine of SEQ ID NO:77
  modified_base (3)..(3): 2' Fluoro Guanosine
  modified_base (4)..(4): 2'O-Methyl Cytosine
  modified_base (5)..(5): 2' Fluoro Guanosine
  modified_base (6)..(6): 2'O-Methyl Cytosine
  modified_base (7)..(8): 2' Fluoro Guanosine
  modified_base (9)..(9): 2'O-Methyl Adenosine
  modified_base (10)..(11): 2' Fluoro Guanosine
  modified_base (12)..(12): 2'O-Methyl Cytosine
  modified_base (13)..(14): um
  modified_base (15)..(15): 2' Fluoro Guanosine
  modified_base (16)..(16): 2'O-Methyl Adenosine
  modified_base (17)..(18): 2' Fluoro Guanosine
  modified_base (19)..(19): um
  modified_base (20)..(20): 2'O-Methyl Adenosine
  modified_base (21)..(21): 2' Fluoro Guanosine
  modified_base (22)..(23): 2'O-Methyl Cytosine
  modified_base (24)..(24): 2' Fluoro Guanosine
  modified_base (25)..(27): um
  modified_base (28)..(28): gm
  modified_base (29)..(29): um
  modified_base (30)..(30): 2'O-Methyl Cytosine
  modified_base (31)..(32): gm
  modified_base (33)..(33): inverted deoxythymidine incorporated at the 3'  end
  modified_base (33)..(33): 2'O-Methyl Cytosine

SEQ ID NO: 303 - RNA, 38 nt, Artificial Sequence; identical to SEQ ID NO: 78
  Aptamer
  modified_base (1)..(1): gm
  misc_feature (1)..(1): The  2'O-Methyl Guanosine is attached through the linker 1,3-propanediolspacer to 2'O-Methyl Guanosine of SEQ ID NO:153
  modified_base (2)..(2): 2'O-Methyl Cytosine
  modified_base (3)..(4): gm
  modified_base (5)..(5): 2'O-Methyl Cytosine
  modified_base (6)..(6): gm
  modified_base (7)..(7): 2'O-Methyl Adenosine
  modified_base (8)..(8): 2'O-Methyl Cytosine
  modified_base (9)..(10): gm
  modified_base (11)..(11): um
  modified_base (12)..(12): 2'O-Methyl Adenosine
  modified_base (13)..(13): gm
  modified_base (14)..(14): 2'O-Methyl Adenosine
  modified_base (15)..(16): um
  modified_base (17)..(17): 2'O-Methyl Adenosine
  modified_base (18)..(18): um
  modified_base (19)..(21): 2' Fluoro Guanosine
  modified_base (22)..(22): 2'O-Methyl Cytosine
  modified_base (23)..(23): 2'O-Methyl Adenosine
  modified_base (24)..(24): 2' Fluoro Guanosine
  modified_base (25)..(25): um
  modified_base (26)..(26): 2' Fluoro Guanosine
  modified_base (27)..(27): um
  modified_base (28)..(28): 2' Fluoro Guanosine
  modified_base (29)..(29): 2'O-Methyl Adenosine
  modified_base (30)..(31): 2'O-Methyl Cytosine
  modified_base (32)..(32): gm
  modified_base (33)..(33): 2'O-Methyl Cytosine
  modified_base (34)..(34): gm
  modified_base (35)..(36): 2'O-Methyl Cytosine
  modified_base (37)..(37): gm
  modified_base (38)..(38): 2'O-Methyl Cytosine
  modified_base (38)..(38): inverted deoxythymidine incorporated at the 3'  end

SEQ ID NO: 304 - RNA, 38 nt, Artificial Sequence; identical to SEQ ID NO: 78
  Aptamer
  modified_base (1)..(1): gm
  misc_feature (1)..(1): The 2'O-Methyl Guanosine is attached through the linker hexaethylene glycol spacer to 2'O-Methyl Guanosine of SEQ ID:154
  modified_base (2)..(2): 2'O-Methyl Cytosine
  modified_base (3)..(4): gm
  modified_base (5)..(5): 2'O-Methyl Cytosine
  modified_base (6)..(6): gm
  modified_base (7)..(7): 2'O-Methyl Adenosine
  modified_base (8)..(8): 2'O-Methyl Cytosine
  modified_base (9)..(10): gm
  modified_base (11)..(11): um
  modified_base (12)..(12): 2'O-Methyl Adenosine
  modified_base (13)..(13): gm
  modified_base (14)..(14): 2'O-Methyl Adenosine
  modified_base (15)..(16): um
  modified_base (17)..(17): 2'O-Methyl Adenosine
  modified_base (18)..(18): um
  modified_base (19)..(21): 2' Fluoro Guanosine
  modified_base (22)..(22): 2'O-Methyl Cytosine
  modified_base (23)..(23): 2'O-Methyl Adenosine
  modified_base (24)..(24): 2' Fluoro Guanosine
  modified_base (25)..(25): um
  modified_base (26)..(26): 2' Fluoro Guanosine
  modified_base (27)..(27): um
  modified_base (28)..(28): 2' Fluoro Guanosine
  modified_base (29)..(29): 2'O-Methyl Adenosine
  modified_base (30)..(31): 2'O-Methyl Cytosine
  modified_base (32)..(32): gm
  modified_base (33)..(33): 2'O-Methyl Cytosine
  modified_base (34)..(34): gm
  modified_base (35)..(36): 2'O-Methyl Cytosine
  modified_base (37)..(37): gm
  modified_base (38)..(38): 2'O-Methyl Cytosine
  modified_base (38)..(38): inverted deoxythymidine incorporated at the 3'  end

SEQ ID NO: 305 - RNA, 31 nt, Artificial Sequence; identical to SEQ ID NO: 20
  Aptamer
  modified_base (1)..(2): 2'O-Methyl Cytosine
  misc_feature (1)..(1): The 2'O-Methyl cytosine is attached through the linker 1,3-propanediolspacer to 2'O-Methyl cytosine of SEQ ID NO:157
  modified_base (3)..(3): 2' Fluoro Guanosine
  modified_base (4)..(4): 2'O-Methyl Cytosine
  modified_base (5)..(5): 2' Fluoro Guanosine
  modified_base (6)..(6): 2'O-Methyl Cytosine
  modified_base (7)..(8): 2' Fluoro Guanosine
  modified_base (9)..(9): 2'O-Methyl Adenosine
  modified_base (10)..(11): 2' Fluoro Guanosine
  modified_base (12)..(12): 2'O-Methyl Cytosine
  modified_base (13)..(14): um
  modified_base (15)..(15): 2' Fluoro Guanosine
  modified_base (16)..(16): 2'O-Methyl Adenosine
  modified_base (17)..(18): 2' Fluoro Guanosine
  modified_base (19)..(19): um
  modified_base (20)..(20): 2'O-Methyl Adenosine
  modified_base (21)..(21): 2' Fluoro Guanosine
  modified_base (22)..(23): 2'O-Methyl Cytosine
  modified_base (24)..(24): 2' Fluoro Guanosine
  modified_base (25)..(27): um
  modified_base (28)..(28): gm
  modified_base (29)..(29): um
  modified_base (30)..(30): 2'O-Methyl Cytosine
  modified_base (31)..(31): gm
  modified_base (31)..(31): innverted deoxythymidine incorporated at the 3'  end

SEQ ID NO: 306 - RNA, 31 nt, Artificial Sequence; identical to SEQ ID NO: 20
  Aptamer
  modified_base (1)..(2): 2'O-Methyl Cytosine
  misc_feature (1)..(1): The 2'O-Methyl cytosine is attached through the linker 1,3-propanediolspacer to 2'O-Methyl cytosine of another nucleotide sequence CXAC
  modified_base (3)..(3): 2' Fluoro Guanosine
  modified_base (4)..(4): 2'O-Methyl Cytosine
  modified_base (5)..(5): 2' Fluoro Guanosine
  modified_base (6)..(6): 2'O-Methyl Cytosine
  modified_base (7)..(8): 2' Fluoro Guanosine
  modified_base (9)..(9): 2'O-Methyl Adenosine
  modified_base (10)..(11): 2' Fluoro Guanosine
  modified_base (12)..(12): 2'O-Methyl Cytosine
  modified_base (13)..(14): um
  modified_base (15)..(15): 2' Fluoro Guanosine
  modified_base (16)..(16): 2'O-Methyl Adenosine
  modified_base (17)..(18): 2' Fluoro Guanosine
  modified_base (19)..(19): um
  modified_base (20)..(20): 2'O-Methyl Adenosine
  modified_base (21)..(21): 2' Fluoro Guanosine
  modified_base (22)..(23): 2'O-Methyl Cytosine
  modified_base (24)..(24): 2' Fluoro Guanosine
  modified_base (27)..(27): um
  modified_base (28)..(28): gm
  modified_base (29)..(29): um
  modified_base (30)..(30): 2'O-Methyl Cytosine
  modified_base (31)..(31): inverted deoxythymidine incorporated at the 3'  end
  modified_base (31)..(31): gm

SEQ ID NO: 307 - RNA, 31 nt, Artificial Sequence; identical to SEQ ID NO: 20
  Aptamer
  modified_base (1)..(2): 2'O-Methyl Cytosine
  misc_feature (1)..(1): The 2'O-Methyl cytosine is attached through the linker 1,3-propanediolspacer to 2'O-Methyl cytosine of another nucleotide sequence CXAC
  modified_base (3)..(3): 2' Fluoro Guanosine
  modified_base (4)..(4): 2'O-Methyl Cytosine
  modified_base (5)..(5): 2' Fluoro Guanosine
  modified_base (6)..(6): 2'O-Methyl Cytosine
  modified_base (7)..(8): 2' Fluoro Guanosine
  modified_base (9)..(9): 2'O-Methyl Adenosine
  modified_base (10)..(11): 2' Fluoro Guanosine
  modified_base (12)..(12): 2'O-Methyl Cytosine
  modified_base (13)..(14): um
  modified_base (15)..(15): 2' Fluoro Guanosine
  modified_base (16)..(16): 2'O-Methyl Adenosine
  modified_base (17)..(18): 2' Fluoro Guanosine
  modified_base (19)..(19): um
  modified_base (20)..(20): 2'O-Methyl Adenosine
  modified_base (21)..(21): 2' Fluoro Guanosine
  modified_base (22)..(23): 2'O-Methyl Cytosine
  modified_base (24)..(24): 2' Fluoro Guanosine
  modified_base (25)..(27): um
  modified_base (28)..(28): gm
  modified_base (29)..(29): um
  modified_base (30)..(30): 2'O-Methyl Cytosine
  modified_base (31)..(31): gm
  modified_base (31)..(31): inverted deoxythymidine incorporated at the 3'  end

SEQ ID NO: 308 - RNA, 31 nt, Artificial Sequence; identical to SEQ ID NO: 20
  Aptamer
  modified_base (1)..(1): 2'O-Methyl Cytosine
  misc_feature (1)..(1): The 2'O-Methyl cytosine is attached through the linker 1,3-propanediolspacer to 2'O-Methyl cytosine of SEQ ID NO:160
  modified_base (3)..(3): 2' Fluoro Guanosine
  modified_base (4)..(4): 2'O-Methyl Cytosine
  modified_base (5)..(5): 2' Fluoro Guanosine
  modified_base (6)..(6): 2'O-Methyl Cytosine
  modified_base (7)..(8): 2' Fluoro Guanosine
  modified_base (9)..(9): 2'O-Methyl Adenosine
  modified_base (10)..(11): 2' Fluoro Guanosine
  modified_base (12)..(12): 2'O-Methyl Cytosine
  modified_base (13)..(14): um
  modified_base (15)..(15): 2' Fluoro Guanosine
  modified_base (16)..(16): 2'O-Methyl Adenosine
  modified_base (17)..(18): 2' Fluoro Guanosine
  modified_base (19)..(19): um
  modified_base (20)..(20): 2'O-Methyl Adenosine
  modified_base (21)..(21): 2' Fluoro Guanosine
  modified_base (22)..(23): 2'O-Methyl Cytosine
  modified_base (24)..(24): 2' Fluoro Guanosine
  modified_base (25)..(27): um
  modified_base (28)..(28): gm
  modified_base (29)..(29): um
  modified_base (30)..(30): 2'O-Methyl Cytosine
  modified_base (31)..(31): gm
  modified_base (31)..(31): inverted deoxythymidine incorporated at the 3'  end

SEQ ID NO: 309 - RNA, 31 nt, Artificial Sequence; identical to SEQ ID NO: 20
  Aptamer
  modified_base (1)..(1): 2'O-Methyl Cytosine
  misc_feature (1)..(1): The 2'O-Methyl cytosine is attached through the linker 1,3-propanediolspacer to 2'O-Methyl cytosine of SEQ ID NO:161
  modified_base (3)..(3): 2' Fluoro Guanosine
  modified_base (4)..(4): 2'O-Methyl Cytosine
  modified_base (5)..(5): 2' Fluoro Guanosine
  modified_base (6)..(6): 2'O-Methyl Cytosine
  modified_base (7)..(8): 2' Fluoro Guanosine
  modified_base (9)..(9): 2'O-Methyl Adenosine
  modified_base (10)..(11): 2' Fluoro Guanosine
  modified_base (12)..(12): 2'O-Methyl Cytosine
  modified_base (13)..(14): um
  modified_base (15)..(15): 2' Fluoro Guanosine
  modified_base (16)..(16): 2'O-Methyl Adenosine
  modified_base (17)..(18): 2' Fluoro Guanosine
  modified_base (19)..(19): um
  modified_base (20)..(20): 2'O-Methyl Adenosine
  modified_base (21)..(21): 2' Fluoro Guanosine
  modified_base (22)..(23): 2'O-Methyl Cytosine
  modified_base (24)..(24): 2' Fluoro Guanosine
  modified_base (25)..(27): um
  modified_base (28)..(28): gm
  modified_base (29)..(29): um
  modified_base (30)..(30): 2'O-Methyl Cytosine
  modified_base (31)..(31): gm
  modified_base (31)..(31): inverted deoxythymidine incorporated at the 3'  end

SEQ ID NO: 310 - RNA, 38 nt, Artificial Sequence; identical to SEQ ID NO: 78
  Aptamer
  misc_feature (1)..(1): The 2'O-Methyl Guanosine is attached through the linker 1,3-propanediolspacer to 2'O-Methyl cytosine of SEQ ID NO:163
  modified_base (1)..(1): gm
  modified_base (2)..(2): 2'O-Methyl Cytosine
  modified_base (3)..(4): gm
  modified_base (5)..(5): 2'O-Methyl Cytosine
  modified_base (6)..(6): gm
  modified_base (7)..(7): 2'O-Methyl Adenosine
  modified_base (8)..(8): 2'O-Methyl Cytosine
  modified_base (9)..(10): gm
  modified_base (11)..(11): um
  modified_base (12)..(12): 2'O-Methyl Adenosine
  modified_base (13)..(13): gm
  modified_base (14)..(14): 2'O-Methyl Adenosine
  modified_base (15)..(16): um
  modified_base (17)..(17): 2'O-Methyl Adenosine
  modified_base (18)..(18): um
  modified_base (19)..(21): 2' Fluoro Guanosine
  modified_base (22)..(22): 2'O-Methyl Cytosine
  modified_base (23)..(23): 2'O-Methyl Adenosine
  modified_base (24)..(24): 2' Fluoro Guanosine
  modified_base (25)..(25): um
  modified_base (26)..(26): 2' Fluoro Guanosine
  modified_base (27)..(27): um
  modified_base (28)..(28): 2' Fluoro Guanosine
  modified_base (29)..(29): 2'O-Methyl Adenosine
  modified_base (30)..(31): 2'O-Methyl Cytosine
  modified_base (32)..(32): gm
  modified_base (33)..(33): 2'O-Methyl Cytosine
  modified_base (34)..(34): gm
  modified_base (35)..(36): 2'O-Methyl Cytosine
  modified_base (37)..(37): gm
  modified_base (38)..(38): 2'O-Methyl Cytosine
  modified_base (38)..(38): inverted deoxythymidine incorporated at the 3'  end

SEQ ID NO: 311 - RNA, 38 nt, Artificial Sequence; identical to SEQ ID NO: 78
  Aptamer
  modified_base (1)..(1): gm
  modified_base (1)..(1): The 2'O-Methyl Guanosine is attached through the linker hexaethylene glycol spacer to 2'O-Methyl cytosine of SEQ ID:164
  modified_base (2)..(2): 2'O-Methyl Cytosine
  modified_base (3)..(4): gm
  modified_base (5)..(5): 2'O-Methyl Cytosine
  modified_base (6)..(6): gm
  modified_base (7)..(7): 2'O-Methyl Adenosine
  modified_base (8)..(8): 2'O-Methyl Cytosine
  modified_base (9)..(10): gm
  modified_base (11)..(11): um
  modified_base (12)..(12): 2'O-Methyl Adenosine
  modified_base (13)..(13): gm
  modified_base (14)..(14): 2'O-Methyl Adenosine
  modified_base (15)..(16): um
  modified_base (17)..(17): 2'O-Methyl Adenosine
  modified_base (18)..(18): um
  modified_base (19)..(19): 2' Fluoro Guanosine
  modified_base (20)..(21): 2' Fluoro Guanosine
  modified_base (22)..(22): 2'O-Methyl Cytosine
  modified_base (23)..(23): 2'O-Methyl Adenosine
  modified_base (24)..(24): 2' Fluoro Guanosine
  modified_base (25)..(25): um
  modified_base (27)..(27): um
  modified_base (28)..(28): 2' Fluoro Guanosine
  modified_base (29)..(29): 2'O-Methyl Adenosine
  modified_base (30)..(31): 2'O-Methyl Cytosine
  modified_base (32)..(32): gm
  modified_base (33)..(33): 2'O-Methyl Cytosine
  modified_base (34)..(34): gm
  modified_base (35)..(36): 2'O-Methyl Cytosine
  modified_base (37)..(37): gm
  modified_base (38)..(38): 2'O-Methyl Cytosine
  modified_base (38)..(38): inverted deoxythymidine incorporated at the 3'  end

SEQ ID NO: 312 - RNA, 38 nt, Artificial Sequence; identical to SEQ ID NO: 78
  Aptamer
  misc_feature (1)..(1): 2'O-Methyl guanosine is attached to 2'O-Methyl deoxyuridine linker of SEQ ID NO: 165
  misc_feature (1)..(1): 2'O-Methyl guanosine is attached to 2'O-Methyl deoxyuridine linker of SEQ ID NO: 165
  modified_base (1)..(1): gm
  modified_base (2)..(2): 2'O-Methyl Cytosine
  modified_base (3)..(4): gm
  modified_base (5)..(5): 2'O-Methyl Cytosine
  modified_base (6)..(6): gm
  modified_base (7)..(7): 2'O-Methyl Adenosine
  modified_base (8)..(8): 2'O-Methyl Cytosine
  modified_base (9)..(10): gm
  modified_base (11)..(11): um
  modified_base (12)..(12): 2'O-Methyl Adenosine
  modified_base (13)..(13): gm
  modified_base (14)..(14): 2'O-Methyl Adenosine
  modified_base (15)..(16): um
  modified_base (17)..(17): 2'O-Methyl Adenosine
  modified_base (18)..(18): um
  modified_base (19)..(21): 2' Fluoro Guanosine
  modified_base (22)..(22): 2'O-Methyl Cytosine
  modified_base (23)..(23): 2'O-Methyl Adenosine
  modified_base (24)..(24): 2' Fluoro Guanosine
  modified_base (25)..(25): um
  modified_base (26)..(26): 2' Fluoro Guanosine
  modified_base (27)..(27): um
  modified_base (28)..(28): 2' Fluoro Guanosine
  modified_base (29)..(29): 2'O-Methyl Adenosine
  modified_base (30)..(31): 2'O-Methyl Cytosine
  modified_base (32)..(32): gm
  modified_base (33)..(33): 2'O-Methyl Cytosine
  modified_base (34)..(34): gm
  modified_base (35)..(36): 2'O-Methyl Cytosine
  modified_base (37)..(37): gm
  modified_base (38)..(38): inverted deoxythymidine incorporated at the 3'  end
  modified_base (38)..(38): 2'O-Methyl Cytosine

SEQ ID NO: 313 - RNA, 33 nt, Artificial Sequence; identical to SEQ ID NO: 152
  Aptamer
  modified_base (1)..(2): 2'O-Methyl Cytosine
  misc_feature (1)..(1): The 2'O-Methyl cytosine is attached through the linker 1,3-propanediolspacer to 2'O-Methyl cytosine of SEQ ID NO:167
  modified_base (3)..(3): 2' Fluoro Guanosine
  modified_base (4)..(4): 2'O-Methyl Cytosine
  modified_base (5)..(5): 2' Fluoro Guanosine
  modified_base (6)..(6): 2'O-Methyl Cytosine
  modified_base (7)..(8): 2' Fluoro Guanosine
  modified_base (9)..(9): 2'O-Methyl Adenosine
  modified_base (10)..(11): 2' Fluoro Guanosine
  modified_base (12)..(12): 2'O-Methyl Cytosine
  modified_base (13)..(14): um
  modified_base (15)..(15): 2' Fluoro Guanosine
  modified_base (16)..(16): 2'O-Methyl Adenosine
  modified_base (17)..(18): 2' Fluoro Guanosine
  modified_base (19)..(19): um
  modified_base (20)..(20): 2'O-Methyl Adenosine
  modified_base (21)..(21): 2' Fluoro Guanosine
  modified_base (22)..(23): 2'O-Methyl Cytosine
  modified_base (24)..(24): 2' Fluoro Guanosine
  modified_base (25)..(27): um
  modified_base (28)..(28): gm
  modified_base (29)..(29): um
  modified_base (30)..(30): 2'O-Methyl Cytosine
  modified_base (31)..(32): gm
  modified_base (33)..(33): 2'O-Methyl Cytosine
  modified_base (33)..(33): inverted deoxythymidine incorporated at the 3'  end

SEQ ID NO: 314 - RNA, 33 nt, Artificial Sequence; identical to SEQ ID NO: 152
  Aptamer
  modified_base (1)..(2): 2'O-Methyl Cytosine
  misc_feature (1)..(1): The 2'O-Methyl cytosine is attached through the linker 1,3-propanediolspacer to 2'O-Methyl cytosine of SEQ ID NO:168
  modified_base (3)..(3): 2' Fluoro Guanosine
  modified_base (4)..(4): 2'O-Methyl Cytosine
  modified_base (5)..(5): 2' Fluoro Guanosine
  modified_base (6)..(6): 2'O-Methyl Cytosine
  modified_base (7)..(8): 2' Fluoro Guanosine
  modified_base (9)..(9): 2'O-Methyl Adenosine
  modified_base (10)..(11): 2' Fluoro Guanosine
  modified_base (12)..(12): 2'O-Methyl Cytosine
  modified_base (13)..(14): um
  modified_base (15)..(15): 2' Fluoro Guanosine
  modified_base (16)..(16): 2'O-Methyl Adenosine
  modified_base (17)..(18): 2' Fluoro Guanosine
  modified_base (19)..(19): um
  modified_base (20)..(20): 2'O-Methyl Adenosine
  modified_base (21)..(21): 2' Fluoro Guanosine
  modified_base (22)..(23): 2'O-Methyl Cytosine
  modified_base (24)..(24): 2' Fluoro Guanosine
  modified_base (25)..(27): um
  modified_base (28)..(28): gm
  modified_base (29)..(29): um
  modified_base (30)..(30): 2'O-Methyl Cytosine
  modified_base (31)..(32): gm
  modified_base (33)..(33): 2'O-Methyl Cytosine
  modified_base (33)..(33): inverted deoxythymidine incorporated at the 3'  end

SEQ ID NO: 315 - RNA, 33 nt, Artificial Sequence; identical to SEQ ID NO: 152
  Aptamer
  modified_base (1)..(2): 2'O-Methyl Cytosine
  modified_base (1)..(1): The 2'O-Methyl cytosine is attached through the linker 1,3-propanediolspacer to 2'O-Methyl cytosine of SEQ ID NO:169
  modified_base (3)..(3): 2' Fluoro Guanosine
  modified_base (4)..(4): 2'O-Methyl Cytosine
  modified_base (5)..(5): 2' Fluoro Guanosine
  modified_base (6)..(6): 2'O-Methyl Cytosine
  modified_base (7)..(8): 2' Fluoro Guanosine
  modified_base (9)..(9): 2'O-Methyl Adenosine
  modified_base (10)..(11): 2' Fluoro Guanosine
  modified_base (12)..(12): 2'O-Methyl Cytosine
  modified_base (13)..(14): um
  modified_base (15)..(15): 2' Fluoro Guanosine
  modified_base (16)..(16): 2'O-Methyl Adenosine
  modified_base (17)..(18): 2' Fluoro Guanosine
  modified_base (19)..(19): um
  modified_base (20)..(20): 2'O-Methyl Adenosine
  modified_base (21)..(21): 2' Fluoro Guanosine
  modified_base (22)..(23): 2'O-Methyl Cytosine
  modified_base (24)..(24): 2' Fluoro Guanosine
  modified_base (25)..(27): um
  modified_base (28)..(28): gm
  modified_base (29)..(29): um
  modified_base (30)..(30): 2'O-Methyl Cytosine
  modified_base (31)..(32): gm
  modified_base (33)..(33): 2'O-Methyl Cytosine
  modified_base (33)..(33): inverted deoxythymidine incorporated at the 3'  end

SEQ ID NO: 316 - RNA, 33 nt, Artificial Sequence; identical to SEQ ID NO: 152
  Aptamer
  modified_base (1)..(2): 2'O-Methyl Cytosine
  misc_feature (1)..(1): The 2'O-Methyl cytosine is attached through the linker 1,3-propanediolspacer to 2'O-Methyl cytosine of SEQ ID NO:170
  modified_base (3)..(3): 2' Fluoro Guanosine
  modified_base (4)..(4): 2'O-Methyl Cytosine
  modified_base (5)..(5): 2' Fluoro Guanosine
  modified_base (6)..(6): 2'O-Methyl Cytosine
  modified_base (7)..(8): 2' Fluoro Guanosine
  modified_base (9)..(9): 2'O-Methyl Adenosine
  modified_base (10)..(11): 2' Fluoro Guanosine
  modified_base (12)..(12): 2'O-Methyl Cytosine
  modified_base (13)..(14): um
  modified_base (15)..(15): 2' Fluoro Guanosine
  modified_base (16)..(16): 2'O-Methyl Adenosine
  modified_base (17)..(18): 2' Fluoro Guanosine
  modified_base (19)..(19): um
  modified_base (20)..(20): 2'O-Methyl Adenosine
  modified_base (21)..(21): 2' Fluoro Guanosine
  modified_base (22)..(23): 2'O-Methyl Cytosine
  modified_base (24)..(24): 2' Fluoro Guanosine
  modified_base (25)..(27): um
  modified_base (28)..(28): gm
  modified_base (29)..(29): um
  modified_base (30)..(30): 2'O-Methyl Cytosine
  modified_base (31)..(32): gm
  modified_base (33)..(33): 2'O-Methyl Cytosine
  modified_base (33)..(33): inverted deoxythymidine incorporated at the 3'  end

SEQ ID NO: 317 - RNA, 33 nt, Artificial Sequence; identical to SEQ ID NO: 152
  Aptamer
  modified_base (1)..(2): 2'O-Methyl Cytosine
  misc_feature (1)..(1): The 2'O-Methyl cytosine is attached through the linker 1,3-propanediolspacer to 2'O-Methyl cytosine of SEQ ID NO:171
  modified_base (3)..(3): 2' Fluoro Guanosine
  modified_base (4)..(4): 2'O-Methyl Cytosine
  modified_base (5)..(5): 2' Fluoro Guanosine
  modified_base (6)..(6): 2'O-Methyl Cytosine
  modified_base (7)..(8): 2' Fluoro Guanosine
  modified_base (9)..(9): 2'O-Methyl Adenosine
  modified_base (10)..(11): 2' Fluoro Guanosine
  modified_base (12)..(12): 2'O-Methyl Cytosine
  modified_base (13)..(14): um
  modified_base (15)..(15): 2' Fluoro Guanosine
  modified_base (16)..(16): 2'O-Methyl Adenosine
  modified_base (17)..(18): 2' Fluoro Guanosine
  modified_base (19)..(19): um
  modified_base (20)..(20): 2'O-Methyl Adenosine
  modified_base (21)..(21): 2' Fluoro Guanosine
  modified_base (22)..(23): 2'O-Methyl Cytosine
  modified_base (24)..(24): 2' Fluoro Guanosine
  modified_base (25)..(27): um
  modified_base (28)..(28): gm
  modified_base (29)..(29): um
  modified_base (30)..(30): 2'O-Methyl Cytosine
  modified_base (31)..(32): gm
  modified_base (33)..(33): 2'O-Methyl Cytosine
  modified_base (33)..(33): inverted deoxythymidine incorporated at the 3'  end

SEQ ID NO: 318 - RNA, 29 nt, Artificial Sequence
  Aptamer
  misc_feature (1)..(1): The 2'O-Methyl Guanosine  is attached through the linker 1,3-propanediolspacer to  2'O-Methyl Guanosine of SEQ ID NO:174
  modified_base (1)..(1): gm
  modified_base (2)..(2): 2'O-Methyl Cytosine
  modified_base (3)..(4): gm
  modified_base (5)..(5): um
  modified_base (6)..(8): 2' Fluoro Guanosine
  modified_base (9)..(11): 2'O-Methyl Adenosine
  modified_base (12)..(12): um
  modified_base (13)..(13): 2' Fluoro Guanosine
  modified_base (14)..(14): um
  modified_base (15)..(15): 2' Fluoro Guanosine
  modified_base (16)..(16): 2'O-Methyl Adenosine
  modified_base (17)..(17): 2' Fluoro Guanosine
  modified_base (18)..(18): 2'O-Methyl Adenosine
  modified_base (19)..(19): um
  modified_base (20)..(22): 2' Fluoro Guanosine
  modified_base (23)..(24): um
  modified_base (25)..(25): gm
  modified_base (26)..(27): 2'O-Methyl Cytosine
  modified_base (28)..(28): gm
  modified_base (29)..(29): 2'O-Methyl Cytosine
  modified_base (29)..(29): inverted deoxythymidine incorporated at the 3'  end
gcggugggaaaugugagauggguugccgc

SEQ ID NO: 319 - RNA, 29 nt, Artificial Sequence
  Aptamer
  modified_base (1)..(1): gm
  misc_feature (1)..(1): The 2'O-Methyl Guanosine is attached through the linker hexaethylene glycol spacer to 2'O-Methyl Guanosine of SEQ ID:175
  modified_base (2)..(2): 2'O-Methyl Cytosine
  modified_base (3)..(4): gm
  modified_base (5)..(5): um
  modified_base (6)..(8): 2' Fluoro Guanosine
  modified_base (9)..(11): 2'O-Methyl Adenosine
  modified_base (12)..(12): um
  modified_base (13)..(13): 2' Fluoro Guanosine
  modified_base (14)..(14): um
  modified_base (15)..(15): 2' Fluoro Guanosine
  modified_base (16)..(16): 2'O-Methyl Adenosine
  modified_base (17)..(17): 2' Fluoro Guanosine
  modified_base (18)..(18): 2'O-Methyl Adenosine
  modified_base (19)..(19): um
  modified_base (20)..(22): 2' Fluoro Guanosine
  modified_base (23)..(24): um
  modified_base (25)..(25): gm
  modified_base (26)..(27): 2'O-Methyl Cytosine
  modified_base (28)..(28): gm
  modified_base (29)..(29): 2'O-Methyl Cytosine
  modified_base (29)..(29): inverted deoxythymidine incorporated at the 3'  end
gcggugggaaaugugagauggguugccgc

SEQ ID NO: 320 - RNA, 33 nt, Artificial Sequence; identical to SEQ ID NO: 1
  Aptamer
  modified_base (1)..(2): 2'O-Methyl Cytosine
  misc_feature (1)..(1): The 2'O-Methyl cytosine is attached through the linker 1,3-propanediolspacer to 2'O-Methyl cytosine of SEQ ID NO:178
  modified_base (3)..(3): 2' Fluoro Guanosine
  modified_base (4)..(4): 2'O-Methyl Cytosine
  modified_base (5)..(5): 2' Fluoro Guanosine
  modified_base (6)..(6): 2'O-Methyl Cytosine
  modified_base (7)..(8): 2' Fluoro Guanosine
  modified_base (9)..(9): 2'O-Methyl Adenosine
  modified_base (10)..(12): 2' Fluoro Guanosine
  modified_base (13)..(13): gm
  modified_base (14)..(16): um
  modified_base (17)..(17): 2'O-Methyl Cytosine
  modified_base (18)..(18): 2'O-Methyl Adenosine
  modified_base (19)..(19): um
  modified_base (20)..(21): 2'O-Methyl Adenosine
  modified_base (22)..(22): um
  modified_base (23)..(25): 2'O-Methyl Cytosine
  modified_base (26)..(26): 2' Fluoro Guanosine
  modified_base (27)..(29): um
  modified_base (30)..(30): gm
  modified_base (31)..(31): um
  modified_base (32)..(32): 2'O-Methyl Cytosine
  modified_base (33)..(33): gm
  modified_base (33)..(33): inverted deoxythymidine incorporated at the 3'  end

SEQ ID NO: 321 - RNA, 33 nt, Artificial Sequence; identical to SEQ ID NO: 1
  Aptamer
  modified_base (1)..(2): 2'O-Methyl Cytosine
  misc_feature (1)..(1): The 2'O-Methyl cytosine is attached through the linker 1,3-propanediolspacer to 2'O-Methyl cytosine of another nucleotide sequence CXAC
  modified_base (3)..(3): 2' Fluoro Guanosine
  modified_base (4)..(4): 2'O-Methyl Cytosine
  modified_base (5)..(5): 2' Fluoro Guanosine
  modified_base (6)..(6): 2'O-Methyl Cytosine
  modified_base (7)..(8): 2' Fluoro Guanosine
  modified_base (9)..(9): 2'O-Methyl Adenosine
  modified_base (10)..(12): 2' Fluoro Guanosine
  modified_base (13)..(13): gm
  modified_base (14)..(16): um
  modified_base (17)..(17): 2'O-Methyl Cytosine
  modified_base (18)..(18): 2'O-Methyl Adenosine
  modified_base (19)..(19): um
  modified_base (20)..(21): 2'O-Methyl Adenosine
  modified_base (22)..(22): um
  modified_base (23)..(25): 2'O-Methyl Cytosine
  modified_base (26)..(26): 2' Fluoro Guanosine
  modified_base (27)..(29): um
  modified_base (30)..(30): gm
  modified_base (31)..(31): um
  modified_base (32)..(32): 2'O-Methyl Cytosine
  modified_base (33)..(33): inverted deoxythymidine incorporated at the 3'  end
  modified_base (33)..(33): gm

SEQ ID NO: 322 - RNA, 33 nt, Artificial Sequence; identical to SEQ ID NO: 1
  Aptamer
  modified_base (1)..(2): 2'O-Methyl Cytosine
  misc_feature (1)..(1): The 2'O-Methyl cytosine is attached through the linker 1,3-propanediolspacer to 2'O-Methyl cytosine of another nucleotide sequence CXAC
  modified_base (3)..(3): 2' Fluoro Guanosine
  modified_base (4)..(4): 2'O-Methyl Cytosine
  modified_base (5)..(5): 2' Fluoro Guanosine
  modified_base (6)..(6): 2'O-Methyl Cytosine
  modified_base (7)..(8): 2' Fluoro Guanosine
  modified_base (9)..(9): 2'O-Methyl Adenosine
  modified_base (10)..(12): 2' Fluoro Guanosine
  modified_base (13)..(13): gm
  modified_base (14)..(16): um
  modified_base (17)..(17): 2'O-Methyl Cytosine
  modified_base (18)..(18): 2'O-Methyl Adenosine
  modified_base (19)..(19): um
  modified_base (20)..(21): 2'O-Methyl Adenosine
  modified_base (22)..(22): um
  modified_base (23)..(25): 2'O-Methyl Cytosine
  modified_base (26)..(26): 2' Fluoro Guanosine
  modified_base (27)..(29): um
  modified_base (30)..(30): gm
  modified_base (31)..(31): um
  modified_base (32)..(32): 2'O-Methyl Cytosine
  modified_base (33)..(33): gm
  modified_base (33)..(33): inverted deoxythymidine incorporated at the 3'  end

SEQ ID NO: 323 - RNA, 33 nt, Artificial Sequence; identical to SEQ ID NO: 1
  Aptamer
  modified_base (1)..(2): 2'O-Methyl Cytosine
  misc_feature (1)..(1): The 2'O-Methyl cytosine is attached through the linker 1,3-propanediolspacer to 2'O-Methyl cytosine of SEQ ID NO:181
  modified_base (3)..(3): 2' Fluoro Guanosine
  modified_base (4)..(4): 2'O-Methyl Cytosine
  modified_base (5)..(5): 2' Fluoro Guanosine
  modified_base (6)..(6): 2'O-Methyl Cytosine
  modified_base (7)..(8): 2' Fluoro Guanosine
  modified_base (9)..(9): 2'O-Methyl Adenosine
  modified_base (10)..(12): 2' Fluoro Guanosine
  modified_base (13)..(13): gm
  modified_base (14)..(16): um
  modified_base (17)..(17): 2'O-Methyl Cytosine
  modified_base (18)..(18): 2'O-Methyl Adenosine
  modified_base (19)..(19): um
  modified_base (20)..(21): 2'O-Methyl Adenosine
  modified_base (22)..(22): um
  modified_base (23)..(25): 2'O-Methyl Cytosine
  modified_base (26)..(26): 2' Fluoro Guanosine
  modified_base (27)..(29): um
  modified_base (30)..(30): gm
  modified_base (31)..(31): um
  modified_base (32)..(32): 2'O-Methyl Cytosine
  modified_base (33)..(33): gm
  modified_base (33)..(33): inverted deoxythymidine incorporated at the 3'  end

SEQ ID NO: 324 - RNA, 33 nt, Artificial Sequence; identical to SEQ ID NO: 1
  The 2'O-Methyl cytosine is attached through the linker 1,3-propanediolspacer to 2'O-Methyl cytosine of SEQ ID NO:181
  modified_base (1)..(2): 2'O-Methyl Cytosine
  misc_feature (1)..(1): The 2'O-Methyl cytosine is attached through the linker 1,3-propanediolspacer to 2'O-Methyl cytosine of another nucleotide sequence CXAC
  modified_base (3)..(3): 2' Fluoro Guanosine
  modified_base (4)..(4): 2'O-Methyl Cytosine
  modified_base (5)..(5): 2' Fluoro Guanosine
  modified_base (6)..(6): 2'O-Methyl Cytosine
  modified_base (7)..(8): 2' Fluoro Guanosine
  modified_base (9)..(9): 2'O-Methyl Adenosine
  modified_base (10)..(12): 2' Fluoro Guanosine
  modified_base (13)..(13): gm
  modified_base (14)..(16): um
  modified_base (17)..(17): 2'O-Methyl Cytosine
  modified_base (18)..(18): 2'O-Methyl Adenosine
  modified_base (19)..(19): um
  modified_base (20)..(21): 2'O-Methyl Adenosine
  modified_base (22)..(22): um
  modified_base (23)..(25): 2'O-Methyl Cytosine
  modified_base (26)..(26): 2' Fluoro Guanosine
  modified_base (27)..(29): um
  modified_base (30)..(30): gm
  modified_base (31)..(31): um
  modified_base (32)..(32): 2'O-Methyl Cytosine
  modified_base (33)..(33): gm
  modified_base (33)..(33): inverted deoxythymidine incorporated at the 3'  end

SEQ ID NO: 325 - RNA, 29 nt, Artificial Sequence
  Aptamer
  misc_feature (1)..(1): The 2'O-Methyl Guanosine  is attached through the linker 1,3-propanediolspacer to 2'O-Methyl cytosine of SEQ ID NO:184
  modified_base (1)..(1): gm
  modified_base (2)..(2): 2'O-Methyl Cytosine
  modified_base (3)..(4): gm
  modified_base (5)..(5): um
  modified_base (6)..(8): 2' Fluoro Guanosine
  modified_base (9)..(11): 2'O-Methyl Adenosine
  modified_base (12)..(12): um
  modified_base (13)..(13): 2' Fluoro Guanosine
  modified_base (14)..(14): um
  modified_base (15)..(15): 2' Fluoro Guanosine
  modified_base (16)..(16): 2'O-Methyl Adenosine
  modified_base (17)..(17): 2' Fluoro Guanosine
  modified_base (18)..(18): 2'O-Methyl Adenosine
  modified_base (19)..(19): um
  modified_base (20)..(22): 2' Fluoro Guanosine
  modified_base (23)..(24): um
  modified_base (25)..(25): gm
  modified_base (26)..(27): 2'O-Methyl Cytosine
  modified_base (28)..(28): gm
  modified_base (29)..(29): 2'O-Methyl Cytosine
  modified_base (29)..(29): inverted deoxythymidine incorporated at the 3'  end
gcggugggaaaugugagauggguugccgc

SEQ ID NO: 326 - RNA, 29 nt, Artificial Sequence
  Aptamer
  modified_base (1)..(1): gm
  misc_feature (1)..(1): The 2'O-Methyl Guanosine  is attached through the linker hexaethylene glycol spacer to 2'O-Methyl cytosine of SEQ ID:185
  modified_base (2)..(2): 2'O-Methyl Cytosine
  modified_base (3)..(4): gm
  modified_base (5)..(5): um
  modified_base (6)..(8): 2' Fluoro Guanosine
  modified_base (9)..(11): 2'O-Methyl Adenosine
  modified_base (12)..(12): um
  modified_base (13)..(13): 2' Fluoro Guanosine
  modified_base (14)..(14): um
  modified_base (15)..(15): 2' Fluoro Guanosine
  modified_base (16)..(16): 2'O-Methyl Adenosine
  modified_base (17)..(17): 2' Fluoro Guanosine
  modified_base (18)..(18): 2'O-Methyl Adenosine
  modified_base (19)..(19): um
  modified_base (20)..(22): 2' Fluoro Guanosine
  modified_base (23)..(24): um
  modified_base (25)..(25): gm
  modified_base (26)..(27): 2'O-Methyl Cytosine
  modified_base (28)..(28): gm
  modified_base (29)..(29): 2'O-Methyl Cytosine
  modified_base (29)..(29): inverted deoxythymidine incorporated at the 3'  end
gcggugggaaaugugagauggguugccgc

SEQ ID NO: 327 - RNA, 35 nt, Artificial Sequence; identical to SEQ ID NO: 67
  Aptamer
  modified_base (1)..(2): 2'O-Methyl Cytosine
  misc_feature (1)..(1): The 2'O-Methyl cytosine is attached through the linker 1,3-propanediolspacer to 2'O-Methyl cytosine of SEQ ID NO:188
  modified_base (3)..(3): 2' Fluoro Guanosine
  modified_base (4)..(4): 2'O-Methyl Cytosine
  modified_base (5)..(5): 2' Fluoro Guanosine
  modified_base (6)..(6): 2'O-Methyl Cytosine
  modified_base (7)..(8): 2' Fluoro Guanosine
  modified_base (9)..(9): 2'O-Methyl Adenosine
  modified_base (10)..(12): 2' Fluoro Guanosine
  modified_base (13)..(13): gm
  modified_base (14)..(16): um
  modified_base (17)..(17): 2'O-Methyl Cytosine
  modified_base (18)..(18): 2'O-Methyl Adenosine
  modified_base (19)..(19): um
  modified_base (20)..(21): 2'O-Methyl Adenosine
  modified_base (22)..(22): um
  modified_base (23)..(25): 2'O-Methyl Cytosine
  modified_base (26)..(26): 2' Fluoro Guanosine
  modified_base (27)..(28): um
  modified_base (29)..(29): gm
  modified_base (30)..(30): 2' Fluoro Guanosine
  modified_base (31)..(31): um
  modified_base (32)..(32): 2'O-Methyl Cytosine
  modified_base (33)..(34): gm
  modified_base (35)..(35): 2'O-Methyl Adenosine
  modified_base (35)..(35): 2'O-Methyl Cytosine

SEQ ID NO: 328 - RNA, 35 nt, Artificial Sequence; identical to SEQ ID NO: 67
  Aptamer
  modified_base (1)..(2): 2'O-Methyl Cytosine
  misc_feature (1)..(1): The 2'O-Methyl cytosine is attached through the linker 1,3-propanediolspacer to 2'O-Methyl cytosine of another nucleotide sequence XCCXAC
  modified_base (3)..(3): 2' Fluoro Guanosine
  modified_base (4)..(4): 2'O-Methyl Cytosine
  modified_base (5)..(5): 2' Fluoro Guanosine
  modified_base (6)..(6): 2'O-Methyl Cytosine
  modified_base (7)..(8): 2' Fluoro Guanosine
  modified_base (9)..(9): 2'O-Methyl Adenosine
  modified_base (10)..(12): 2' Fluoro Guanosine
  modified_base (13)..(13): gm
  modified_base (14)..(16): um
  modified_base (17)..(17): 2'O-Methyl Cytosine
  modified_base (18)..(18): 2'O-Methyl Adenosine
  modified_base (19)..(19): um
  modified_base (20)..(21): 2'O-Methyl Adenosine
  modified_base (22)..(22): um
  modified_base (23)..(25): 2'O-Methyl Cytosine
  modified_base (26)..(26): 2' Fluoro Guanosine
  modified_base (27)..(28): um
  modified_base (29)..(29): gm
  modified_base (30)..(30): 2' Fluoro Guanosine
  modified_base (31)..(31): um
  modified_base (32)..(32): 2'O-Methyl Cytosine
  modified_base (33)..(34): gm
  modified_base (35)..(35): 2'O-Methyl Cytosine
  modified_base (35)..(35): inverted deoxythymidine incorporated at the 3'  end

SEQ ID NO: 329 - RNA, 35 nt, Artificial Sequence; identical to SEQ ID NO: 67
  Aptamer
  modified_base (1)..(2): 2'O-Methyl Cytosine
  misc_feature (1)..(1): The 2'O-Methyl cytosine is attached through the linker 1,3-propanediolspacer to 2'O-Methyl cytosine of another nucleotide sequence XCCXAC
  modified_base (3)..(3): 2' Fluoro Guanosine
  modified_base (4)..(4): 2'O-Methyl Cytosine
  modified_base (5)..(5): 2' Fluoro Guanosine
  modified_base (6)..(6): 2'O-Methyl Cytosine
  modified_base (7)..(8): 2' Fluoro Guanosine
  modified_base (9)..(9): 2'O-Methyl Adenosine
  modified_base (10)..(12): 2' Fluoro Guanosine
  modified_base (13)..(13): gm
  modified_base (14)..(16): um
  modified_base (17)..(17): 2'O-Methyl Cytosine
  modified_base (18)..(18): 2'O-Methyl Adenosine
  modified_base (19)..(19): um
  modified_base (20)..(21): 2'O-Methyl Adenosine
  modified_base (22)..(22): um
  modified_base (23)..(25): 2'O-Methyl Cytosine
  modified_base (26)..(26): 2' Fluoro Guanosine
  modified_base (27)..(28): um
  modified_base (29)..(29): gm
  modified_base (30)..(30): 2' Fluoro Guanosine
  modified_base (31)..(31): um
  modified_base (32)..(32): 2'O-Methyl Cytosine
  modified_base (33)..(34): gm
  modified_base (35)..(35): inverted deoxythymidine incorporated at the 3'  end
  modified_base (35)..(35): 2'O-Methyl Cytosine

SEQ ID NO: 330 - RNA, 35 nt, Artificial Sequence; identical to SEQ ID NO: 67
  Aptamer
  modified_base (1)..(2): 2'O-Methyl Cytosine
  misc_feature (1)..(1): The 2'O-Methyl cytosine is attached through the linker 1,3-propanediolspacer to 2'O-Methyl cytosine of SEQ ID NO:191
  modified_base (3)..(3): 2' Fluoro Guanosine
  modified_base (4)..(4): 2'O-Methyl Cytosine
  modified_base (5)..(5): 2' Fluoro Guanosine
  modified_base (6)..(6): 2'O-Methyl Cytosine
  modified_base (7)..(8): 2' Fluoro Guanosine
  modified_base (9)..(9): 2'O-Methyl Adenosine
  modified_base (10)..(12): 2' Fluoro Guanosine
  modified_base (13)..(13): gm
  modified_base (14)..(16): um
  modified_base (17)..(17): 2'O-Methyl Cytosine
  modified_base (18)..(18): 2'O-Methyl Adenosine
  modified_base (19)..(19): um
  modified_base (20)..(21): 2'O-Methyl Adenosine
  modified_base (22)..(22): um
  modified_base (23)..(25): 2'O-Methyl Cytosine
  modified_base (26)..(26): 2' Fluoro Guanosine
  modified_base (27)..(28): um
  modified_base (29)..(29): gm
  modified_base (30)..(30): 2' Fluoro Guanosine
  modified_base (31)..(31): um
  modified_base (32)..(32): 2'O-Methyl Cytosine
  modified_base (33)..(34): gm
  modified_base (35)..(35): 2'O-Methyl Cytosine
  modified_base (35)..(35): inverted deoxythymidine incorporated at the 3'  end

SEQ ID NO: 331 - RNA, 35 nt, Artificial Sequence; identical to SEQ ID NO: 67
  Aptamer
  modified_base (1)..(2): 2'O-Methyl Cytosine
  misc_feature (1)..(1): The 2'O-Methyl cytosine is attached through the linker 1,3-propanediolspacer to 2'O-Methyl cytosine of SEQ ID NO:192
  modified_base (3)..(3): 2' Fluoro Guanosine
  modified_base (4)..(4): 2'O-Methyl Cytosine
  modified_base (5)..(5): 2' Fluoro Guanosine
  modified_base (6)..(6): 2'O-Methyl Cytosine
  modified_base (7)..(8): 2' Fluoro Guanosine
  modified_base (9)..(9): 2'O-Methyl Adenosine
  modified_base (10)..(12): 2' Fluoro Guanosine
  modified_base (13)..(13): gm
  modified_base (14)..(16): um
  modified_base (17)..(17): 2'O-Methyl Cytosine
  modified_base (18)..(18): 2'O-Methyl Adenosine
  modified_base (19)..(19): um
  modified_base (20)..(21): 2'O-Methyl Adenosine
  modified_base (22)..(22): um
  modified_base (23)..(25): 2'O-Methyl Cytosine
  modified_base (26)..(26): 2' Fluoro Guanosine
  modified_base (27)..(28): um
  modified_base (29)..(29): gm
  modified_base (30)..(30): 2' Fluoro Guanosine
  modified_base (31)..(31): um
  modified_base (32)..(32): 2'O-Methyl Cytosine
  modified_base (33)..(34): gm
  modified_base (35)..(35): 2'O-Methyl Cytosine
  modified_base (35)..(35): inverted deoxythymidine incorporated at the 3'  end

SEQ ID NO: 332 - RNA, 33 nt, Artificial Sequence; identical to SEQ ID NO: 193
  Aptamer
  modified_base (1)..(1): gm
  misc_feature (1)..(1): The 2'O-Methyl Guanosine is attached through the linker 1,3-propanediolspacer to 2'O-Methyl Guanosine of SEQ ID NO:195
  modified_base (2)..(2): 2'O-Methyl Cytosine
  modified_base (3)..(3): gm
  modified_base (4)..(4): 2'O-Methyl Cytosine
  modified_base (5)..(6): gm
  modified_base (7)..(7): um
  modified_base (8)..(10): 2' Fluoro Guanosine
  modified_base (11)..(13): 2'O-Methyl Adenosine
  modified_base (14)..(14): um
  modified_base (15)..(15): 2' Fluoro Guanosine
  modified_base (16)..(16): um
  modified_base (17)..(17): 2' Fluoro Guanosine
  modified_base (18)..(18): 2'O-Methyl Adenosine
  modified_base (19)..(19): 2' Fluoro Guanosine
  modified_base (20)..(20): 2'O-Methyl Adenosine
  modified_base (21)..(21): um
  modified_base (22)..(24): 2' Fluoro Guanosine
  modified_base (25)..(26): um
  modified_base (27)..(27): gm
  modified_base (28)..(29): 2'O-Methyl Cytosine
  modified_base (30)..(30): gm
  modified_base (31)..(31): 2'O-Methyl Cytosine
  modified_base (32)..(32): gm
  modified_base (33)..(33): 2'O-Methyl Cytosine
  modified_base (33)..(33): inverted deoxythymidine incorporated at the 3'  end

SEQ ID NO: 333 - RNA, 33 nt, Artificial Sequence; identical to SEQ ID NO: 193
  Aptamer
  modified_base (1)..(1): gm
  misc_feature (1)..(1): The 2'O-Methyl Guanosine is attached through the linker hexaethylene glycol spacer to 2'O-Methyl Guanosine  of SEQ ID:196
  modified_base (2)..(2): 2'O-Methyl Cytosine
  modified_base (3)..(3): gm
  modified_base (4)..(4): 2'O-Methyl Cytosine
  modified_base (5)..(6): gm
  modified_base (7)..(7): um
  modified_base (8)..(10): 2' Fluoro Guanosine
  modified_base (11)..(13): 2'O-Methyl Adenosine
  modified_base (14)..(14): um
  modified_base (15)..(15): 2' Fluoro Guanosine
  modified_base (16)..(16): um
  modified_base (17)..(17): 2' Fluoro Guanosine
  modified_base (18)..(18): 2'O-Methyl Adenosine
  modified_base (19)..(19): 2' Fluoro Guanosine
  modified_base (20)..(20): 2'O-Methyl Adenosine
  modified_base (21)..(21): um
  modified_base (22)..(24): 2' Fluoro Guanosine
  modified_base (25)..(26): um
  modified_base (27)..(27): gm
  modified_base (28)..(29): 2'O-Methyl Cytosine
  modified_base (30)..(30): gm
  modified_base (31)..(31): 2'O-Methyl Cytosine
  modified_base (32)..(32): gm
  modified_base (33)..(33): 2'O-Methyl Cytosine
  modified_base (33)..(33): inverted deoxythymidine incorporated at the 3'  end

SEQ ID NO: 334 - RNA, 33 nt, Artificial Sequence; identical to SEQ ID NO: 1
  Aptamer
  modified_base (1)..(2): 2'O-Methyl Cytosine
  misc_feature (1)..(1): The 2'O-Methyl cytosine is attached through the linker 1,3-propanediolspacer to 2'O-Methyl cytosine of SEQ ID NO:199
  misc_feature (1)..(1): The 2'O-Methyl cytosine is attached through the linker 1,3-propanediolspacer to 2'O-Methyl cytosine of SEQ ID NO:199
  modified_base (3)..(3): 2' Fluoro Guanosine
  modified_base (4)..(4): 2'O-Methyl Cytosine
  modified_base (5)..(5): 2' Fluoro Guanosine
  modified_base (6)..(6): 2'O-Methyl Cytosine
  modified_base (7)..(8): 2' Fluoro Guanosine
  modified_base (9)..(9): 2'O-Methyl Adenosine
  modified_base (10)..(12): 2' Fluoro Guanosine
  modified_base (13)..(13): gm
  modified_base (14)..(16): um
  modified_base (17)..(17): 2'O-Methyl Cytosine
  modified_base (18)..(18): 2'O-Methyl Adenosine
  modified_base (19)..(19): um
  modified_base (20)..(21): 2'O-Methyl Adenosine
  modified_base (22)..(22): um
  modified_base (23)..(25): 2'O-Methyl Cytosine
  modified_base (26)..(26): 2' Fluoro Guanosine
  modified_base (27)..(29): um
  modified_base (30)..(30): gm
  modified_base (31)..(31): um
  modified_base (32)..(32): 2'O-Methyl Cytosine
  modified_base (33)..(33): gm
  modified_base (33)..(33): inverted deoxythymidine incorporated at the 3'  end

SEQ ID NO: 335 - RNA, 33 nt, Artificial Sequence; identical to SEQ ID NO: 1
  Aptamer
  modified_base (1)..(2): 2'O-Methyl Cytosine
  misc_feature (1)..(1): The 2'O-Methyl cytosine is attached through the linker 1,3-propanediolspacer to 2'O-Methyl cytosine of another nucleotide sequence CXAC
  modified_base (3)..(3): 2' Fluoro Guanosine
  modified_base (4)..(4): 2'O-Methyl Cytosine
  modified_base (5)..(5): 2' Fluoro Guanosine
  modified_base (6)..(6): 2'O-Methyl Cytosine
  modified_base (7)..(8): 2' Fluoro Guanosine
  modified_base (9)..(9): 2'O-Methyl Adenosine
  modified_base (10)..(12): 2' Fluoro Guanosine
  modified_base (13)..(13): gm
  modified_base (14)..(16): um
  modified_base (17)..(17): 2'O-Methyl Cytosine
  modified_base (18)..(18): 2'O-Methyl Adenosine
  modified_base (19)..(19): um
  modified_base (20)..(21): 2'O-Methyl Adenosine
  modified_base (22)..(22): um
  modified_base (23)..(25): 2'O-Methyl Cytosine
  modified_base (26)..(26): 2' Fluoro Guanosine
  modified_base (27)..(29): um
  modified_base (30)..(30): gm
  modified_base (31)..(31): um
  modified_base (32)..(32): 2'O-Methyl Cytosine
  modified_base (33)..(33): gm
  modified_base (33)..(33): inverted deoxythymidine incorporated at the 3'  end

SEQ ID NO: 336 - RNA, 33 nt, Artificial Sequence; identical to SEQ ID NO: 1
  Aptamer
  modified_base (1)..(2): 2'O-Methyl Cytosine
  misc_feature (1)..(1): The 2'O-Methyl cytosine is attached through the linker 1,3-propanediolspacer to 2'O-Methyl cytosine of another nucleotide sequence CXAC
  modified_base (3)..(3): 2' Fluoro Guanosine
  modified_base (4)..(4): 2'O-Methyl Cytosine
  modified_base (5)..(5): 2' Fluoro Guanosine
  modified_base (6)..(6): 2'O-Methyl Cytosine
  modified_base (7)..(8): 2' Fluoro Guanosine
  modified_base (9)..(9): 2'O-Methyl Adenosine
  modified_base (10)..(12): 2' Fluoro Guanosine
  modified_base (13)..(13): gm
  modified_base (14)..(16): um
  modified_base (17)..(17): 2'O-Methyl Cytosine
  modified_base (18)..(18): 2'O-Methyl Adenosine
  modified_base (19)..(19): um
  modified_base (20)..(21): 2'O-Methyl Adenosine
  modified_base (22)..(22): um
  modified_base (23)..(25): 2'O-Methyl Cytosine
  modified_base (26)..(26): 2' Fluoro Guanosine
  modified_base (27)..(29): um
  modified_base (30)..(30): gm
  modified_base (31)..(31): um
  modified_base (32)..(32): 2'O-Methyl Cytosine
  modified_base (33)..(33): gm
  modified_base (33)..(33): inverted deoxythymidine incorporated at the 3'  end

SEQ ID NO: 337 - RNA, 33 nt, Artificial Sequence; identical to SEQ ID NO: 1
  Aptamer
  modified_base (1)..(2): 2'O-Methyl Cytosine
  misc_feature (1)..(1): The 2'O-Methyl cytosine is attached through the linker 1,3-propanediolspacer to 2'O-Methyl cytosine of SEQ ID:202
  modified_base (3)..(3): 2' Fluoro Guanosine
  modified_base (4)..(4): 2'O-Methyl Cytosine
  modified_base (5)..(5): 2' Fluoro Guanosine
  modified_base (6)..(6): 2'O-Methyl Cytosine
  modified_base (7)..(8): 2' Fluoro Guanosine
  modified_base (9)..(9): 2'O-Methyl Adenosine
  modified_base (10)..(12): 2' Fluoro Guanosine
  modified_base (13)..(13): gm
  modified_base (14)..(16): um
  modified_base (17)..(17): 2'O-Methyl Cytosine
  modified_base (18)..(18): 2'O-Methyl Adenosine
  modified_base (19)..(19): um
  modified_base (20)..(21): 2'O-Methyl Adenosine
  modified_base (22)..(22): um
  modified_base (23)..(25): 2'O-Methyl Cytosine
  modified_base (26)..(26): 2' Fluoro Guanosine
  modified_base (27)..(29): um
  modified_base (30)..(30): gm
  modified_base (31)..(31): um
  modified_base (32)..(32): 2'O-Methyl Cytosine
  modified_base (33)..(33): gm
  modified_base (33)..(33): inverted deoxythymidine incorporated at the 3'  end

SEQ ID NO: 338 - RNA, 33 nt, Artificial Sequence; identical to SEQ ID NO: 1
  Aptamer
  modified_base (1)..(2): 2'O-Methyl Cytosine
  misc_feature (1)..(1): The 2'O-Methyl cytosine is attached through the linker 1,3-propanediolspacer to 2'O-Methyl cytosine of SEQ ID NO:203
  modified_base (3)..(3): 2' Fluoro Guanosine
  modified_base (4)..(4): 2'O-Methyl Cytosine
  modified_base (5)..(5): 2' Fluoro Guanosine
  modified_base (6)..(6): 2'O-Methyl Cytosine
  modified_base (7)..(8): 2' Fluoro Guanosine
  modified_base (9)..(9): 2'O-Methyl Adenosine
  modified_base (10)..(12): 2' Fluoro Guanosine
  modified_base (13)..(13): gm
  modified_base (14)..(16): um
  modified_base (17)..(17): 2'O-Methyl Cytosine
  modified_base (18)..(18): 2'O-Methyl Adenosine
  modified_base (19)..(19): um
  modified_base (20)..(21): 2'O-Methyl Adenosine
  modified_base (22)..(22): um
  modified_base (23)..(25): 2'O-Methyl Cytosine
  modified_base (26)..(26): 2' Fluoro Guanosine
  modified_base (27)..(29): um
  modified_base (30)..(30): gm
  modified_base (31)..(31): um
  modified_base (32)..(32): 2'O-Methyl Cytosine
  modified_base (33)..(33): gm
  modified_base (33)..(33): inverted deoxythymidine incorporated at the 3'  end

SEQ ID NO: 339 - RNA, 33 nt, Artificial Sequence; identical to SEQ ID NO: 193
  Aptamer
  modified_base (1)..(1): gm
  misc_feature (1)..(1): The 2'O-Methyl Guanosine is attached through the linker 1,3-propanediolspacer to 2'O-Methyl cytosine of SEQ ID NO:205
  modified_base (2)..(2): 2'O-Methyl Cytosine
  modified_base (3)..(3): gm
  modified_base (4)..(4): 2'O-Methyl Cytosine
  modified_base (5)..(6): gm
  modified_base (7)..(7): um
  modified_base (8)..(10): 2' Fluoro Guanosine
  modified_base (11)..(13): 2'O-Methyl Adenosine
  modified_base (14)..(14): um
  modified_base (15)..(15): 2' Fluoro Guanosine
  modified_base (16)..(16): um
  modified_base (17)..(17): 2' Fluoro Guanosine
  modified_base (18)..(18): 2'O-Methyl Adenosine
  modified_base (19)..(19): 2' Fluoro Guanosine
  modified_base (20)..(20): 2'O-Methyl Adenosine
  modified_base (21)..(21): um
  modified_base (22)..(24): 2' Fluoro Guanosine
  modified_base (25)..(26): um
  modified_base (27)..(27): gm
  modified_base (28)..(29): 2'O-Methyl Cytosine
  modified_base (30)..(30): gm
  modified_base (31)..(31): 2'O-Methyl Cytosine
  modified_base (32)..(32): gm
  modified_base (33)..(33): 2'O-Methyl Cytosine
  modified_base (33)..(33): inverted deoxythymidine incorporated at the 3'  end

SEQ ID NO: 340 - RNA, 33 nt, Artificial Sequence; identical to SEQ ID NO: 193
  Aptamer
  modified_base (1)..(1): gm
  misc_feature (1)..(1): The 2'O-Methyl Guanosine is attached through the linker hexaethylene glycol spacer to 2'O-Methyl cytosine of SEQ ID:206
  modified_base (2)..(2): 2'O-Methyl Cytosine
  modified_base (3)..(3): gm
  modified_base (4)..(4): 2'O-Methyl Cytosine
  modified_base (5)..(6): gm
  modified_base (7)..(7): um
  modified_base (8)..(10): 2' Fluoro Guanosine
  modified_base (11)..(13): 2'O-Methyl Adenosine
  modified_base (14)..(14): um
  modified_base (15)..(15): 2' Fluoro Guanosine
  modified_base (16)..(16): um
  modified_base (17)..(17): 2' Fluoro Guanosine
  modified_base (18)..(18): 2'O-Methyl Adenosine
  modified_base (19)..(19): 2' Fluoro Guanosine
  modified_base (20)..(20): 2'O-Methyl Adenosine
  modified_base (21)..(21): um
  modified_base (22)..(24): 2' Fluoro Guanosine
  modified_base (25)..(26): um
  modified_base (27)..(27): gm
  modified_base (28)..(29): 2'O-Methyl Cytosine
  modified_base (30)..(30): gm
  modified_base (31)..(31): 2'O-Methyl Cytosine
  modified_base (32)..(32): gm
  modified_base (33)..(33): 2'O-Methyl Cytosine
  modified_base (33)..(33): inverted deoxythymidine incorporated at the 3'  end

SEQ ID NO: 341 - RNA, 35 nt, Artificial Sequence; identical to SEQ ID NO: 67
  Aptamer
  modified_base (1)..(2): 2'O-Methyl Cytosine
  misc_feature (1)..(1): The 2'O-Methyl cytosine is attached through the linker 1,3-propanediolspacer to 2'O-Methyl cytosine of SEQ ID NO:209
  modified_base (3)..(3): 2' Fluoro Guanosine
  modified_base (4)..(4): 2'O-Methyl Cytosine
  modified_base (5)..(5): 2' Fluoro Guanosine
  modified_base (6)..(6): 2'O-Methyl Cytosine
  modified_base (7)..(8): 2' Fluoro Guanosine
  modified_base (9)..(9): 2'O-Methyl Adenosine
  modified_base (10)..(12): 2' Fluoro Guanosine
  modified_base (13)..(13): gm
  modified_base (14)..(16): um
  modified_base (17)..(17): 2'O-Methyl Cytosine
  modified_base (18)..(18): 2'O-Methyl Adenosine
  modified_base (19)..(19): um
  modified_base (20)..(21): 2'O-Methyl Adenosine
  modified_base (22)..(22): um
  modified_base (23)..(25): 2'O-Methyl Cytosine
  modified_base (26)..(26): 2' Fluoro Guanosine
  modified_base (27)..(29): um
  modified_base (30)..(30): gm
  modified_base (31)..(31): um
  modified_base (32)..(32): 2'O-Methyl Cytosine
  modified_base (33)..(34): gm
  modified_base (35)..(35): 2'O-Methyl Cytosine
  modified_base (35)..(35): inverted deoxythymidine incorporated at the 3'  end

SEQ ID NO: 342 - RNA, 35 nt, Artificial Sequence; identical to SEQ ID NO: 67
  Aptamer
  modified_base (1)..(2): 2'O-Methyl Cytosine
  misc_feature (1)..(1): The 2'O-Methyl cytosine is attached through the linker 1,3-propanediolspacer to 2'O-Methyl cytosine of another nucleotide sequence XCCXAC
  modified_base (3)..(3): 2' Fluoro Guanosine
  modified_base (4)..(4): 2'O-Methyl Cytosine
  modified_base (5)..(5): 2' Fluoro Guanosine
  modified_base (6)..(6): 2'O-Methyl Cytosine
  modified_base (7)..(8): 2' Fluoro Guanosine
  modified_base (9)..(9): 2'O-Methyl Adenosine
  modified_base (10)..(12): 2' Fluoro Guanosine
  modified_base (13)..(13): gm
  modified_base (14)..(16): um
  modified_base (17)..(17): 2'O-Methyl Cytosine
  modified_base (18)..(18): 2'O-Methyl Adenosine
  modified_base (19)..(19): um
  modified_base (20)..(21): 2'O-Methyl Adenosine
  modified_base (22)..(22): um
  modified_base (23)..(25): 2'O-Methyl Cytosine
  modified_base (26)..(26): 2' Fluoro Guanosine
  modified_base (27)..(29): um
  modified_base (30)..(30): gm
  modified_base (31)..(31): um
  modified_base (32)..(32): 2'O-Methyl Cytosine
  modified_base (33)..(34): gm
  modified_base (35)..(35): 2'O-Methyl Cytosine
  modified_base (35)..(35): inverted deoxythymidine incorporated at the 3'  end

SEQ ID NO: 343 - RNA, 35 nt, Artificial Sequence; identical to SEQ ID NO: 67
  Aptamer
  modified_base (1)..(2): 2'O-Methyl Cytosine
  misc_feature (1)..(1): The 2'O-Methyl cytosine is attached through the linker 1,3-propanediolspacer to 2'O-Methyl cytosine of another nucleotide sequence XCCXAC
  modified_base (3)..(3): 2' Fluoro Guanosine
  modified_base (4)..(4): 2'O-Methyl Cytosine
  modified_base (5)..(5): 2' Fluoro Guanosine
  modified_base (6)..(6): 2'O-Methyl Cytosine
  modified_base (7)..(8): 2' Fluoro Guanosine
  modified_base (9)..(9): 2'O-Methyl Adenosine
  modified_base (10)..(12): 2' Fluoro Guanosine
  modified_base (13)..(13): gm
  modified_base (14)..(16): um
  modified_base (17)..(17): 2'O-Methyl Cytosine
  modified_base (18)..(18): 2'O-Methyl Adenosine
  modified_base (19)..(19): um
  modified_base (20)..(21): 2'O-Methyl Adenosine
  modified_base (22)..(22): um
  modified_base (23)..(25): 2'O-Methyl Cytosine
  modified_base (26)..(26): 2' Fluoro Guanosine
  modified_base (27)..(29): um
  modified_base (30)..(30): gm
  modified_base (31)..(31): um
  modified_base (32)..(32): 2'O-Methyl Cytosine
  modified_base (33)..(34): gm
  modified_base (35)..(35): 2'O-Methyl Cytosine
  modified_base (35)..(35): inverted deoxythymidine incorporated at the 3'  end

SEQ ID NO: 344 - RNA, 35 nt, Artificial Sequence; identical to SEQ ID NO: 67
  Aptamer
  modified_base (1)..(2): 2'O-Methyl Cytosine
  misc_feature (1)..(1): The 2'O-Methyl cytosine is attached through the linker 1,3-propanediolspacer to 2'O-Methyl cytosine of SEQ ID NO:212
  modified_base (3)..(3): 2' Fluoro Guanosine
  modified_base (4)..(4): 2'O-Methyl Cytosine
  modified_base (5)..(5): 2' Fluoro Guanosine
  modified_base (6)..(6): 2'O-Methyl Cytosine
  modified_base (7)..(8): 2' Fluoro Guanosine
  modified_base (9)..(9): 2'O-Methyl Adenosine
  modified_base (10)..(12): 2' Fluoro Guanosine
  modified_base (13)..(13): gm
  modified_base (14)..(16): um
  modified_base (17)..(17): 2'O-Methyl Cytosine
  modified_base (18)..(18): 2'O-Methyl Adenosine
  modified_base (19)..(19): um
  modified_base (20)..(21): 2'O-Methyl Adenosine
  modified_base (22)..(22): um
  modified_base (23)..(25): 2'O-Methyl Cytosine
  modified_base (26)..(26): 2' Fluoro Guanosine
  modified_base (27)..(29): um
  modified_base (30)..(30): gm
  modified_base (31)..(31): um
  modified_base (32)..(32): 2'O-Methyl Cytosine
  modified_base (33)..(34): gm
  modified_base (35)..(35): 2'O-Methyl Cytosine
  modified_base (35)..(35): inverted deoxythymidine incorporated at the 3'  end

SEQ ID NO: 345 - RNA, 35 nt, Artificial Sequence; identical to SEQ ID NO: 67
  Aptamer
  modified_base (1)..(2): 2'O-Methyl Cytosine
  misc_feature (1)..(1): The 2'O-Methyl cytosine is attached through the linker 1,3-propanediolspacer to 2'O-Methyl cytosine of SEQ ID NO:213
  modified_base (3)..(3): 2' Fluoro Guanosine
  modified_base (4)..(4): 2'O-Methyl Cytosine
  modified_base (5)..(5): 2' Fluoro Guanosine
  modified_base (6)..(6): 2'O-Methyl Cytosine
  modified_base (7)..(8): 2' Fluoro Guanosine
  modified_base (9)..(9): 2'O-Methyl Adenosine
  modified_base (10)..(12): 2' Fluoro Guanosine
  modified_base (13)..(13): gm
  modified_base (14)..(16): um
  modified_base (17)..(17): 2'O-Methyl Cytosine
  modified_base (18)..(18): 2'O-Methyl Adenosine
  modified_base (19)..(19): um
  modified_base (20)..(21): 2'O-Methyl Adenosine
  modified_base (22)..(22): um
  modified_base (23)..(25): 2'O-Methyl Cytosine
  modified_base (26)..(26): 2' Fluoro Guanosine
  modified_base (27)..(29): um
  modified_base (30)..(30): gm
  modified_base (31)..(31): um
  modified_base (32)..(32): 2'O-Methyl Cytosine
  modified_base (33)..(34): gm
  modified_base (35)..(35): inverted deoxythymidine incorporated at the 3'  end
  modified_base (35)..(35): 2'O-Methyl Cytosine

SEQ ID NO: 346 - RNA, 29 nt, Artificial Sequence
  Aptamer
  modified_base (1)..(1): gm
  misc_feature (1)..(1): The 2'O-Methyl Guanosine is attached through the linker 1,3-propanediolspacer to 2'O-Methyl Guanosine of SEQ ID NO:215
  modified_base (2)..(2): 2'O-Methyl Cytosine
  modified_base (3)..(4): gm
  modified_base (5)..(5): um
  modified_base (6)..(8): 2' Fluoro Guanosine
  modified_base (9)..(11): 2'O-Methyl Adenosine
  modified_base (12)..(12): um
  modified_base (13)..(13): 2' Fluoro Guanosine
  modified_base (14)..(14): um
  modified_base (15)..(15): 2' Fluoro Guanosine
  modified_base (16)..(16): 2'O-Methyl Adenosine
  modified_base (17)..(17): 2' Fluoro Guanosine
  modified_base (18)..(18): 2'O-Methyl Adenosine
  modified_base (19)..(19): um
  modified_base (20)..(22): 2' Fluoro Guanosine
  modified_base (23)..(24): um
  modified_base (25)..(25): gm
  modified_base (26)..(27): 2'O-Methyl Cytosine
  modified_base (28)..(28): gm
  modified_base (29)..(29): 2'O-Methyl Cytosine
  modified_base (29)..(29): inverted deoxythymidine incorporated at the 3'  end
gcggugggaaaugugagauggguugccgc

SEQ ID NO: 347 - RNA, 29 nt, Artificial Sequence
  Aptamer
  modified_base (1)..(1): gm
  misc_feature (1)..(1): The  2'O-Methyl Guanosine is attached through the linker hexaethylene glycol spacer to  2'O-Methyl Guanosine of SEQ ID:216
  modified_base (2)..(2): 2'O-Methyl Cytosine
  modified_base (3)..(4): gm
  modified_base (5)..(5): um
  modified_base (6)..(8): 2' Fluoro Guanosine
  modified_base (9)..(11): 2'O-Methyl Adenosine
  modified_base (12)..(12): um
  modified_base (13)..(13): 2' Fluoro Guanosine
  modified_base (14)..(14): um
  modified_base (15)..(15): 2' Fluoro Guanosine
  modified_base (16)..(16): 2'O-Methyl Adenosine
  modified_base (17)..(17): 2' Fluoro Guanosine
  modified_base (18)..(18): 2'O-Methyl Adenosine
  modified_base (19)..(19): um
  modified_base (20)..(22): 2' Fluoro Guanosine
  modified_base (23)..(24): um
  modified_base (25)..(25): gm
  modified_base (26)..(27): 2'O-Methyl Cytosine
  modified_base (28)..(28): gm
  modified_base (29)..(29): 2'O-Methyl Cytosine
  modified_base (29)..(29): inverted deoxythymidine incorporated at the 3'  end
gcggugggaaaugugagauggguugccgc

SEQ ID NO: 348 - RNA, 36 nt, Artificial Sequence; identical to SEQ ID NO: 9
  Aptamer
  modified_base (1)..(1): 2'O-Methyl Cytosine
  misc_feature (1)..(1): The 2'O-Methyl cytosine is attached through the linker 1,3-propanediolspacer to 2'O-Methyl cytosine of SEQ ID NO:220
  modified_base (2)..(2): 2'O-Methyl Adenosine
  modified_base (3)..(3): 2'O-Methyl Adenosine
  modified_base (4)..(4): 2'O-Methyl Cytosine
  modified_base (5)..(5): um
  modified_base (6)..(7): 2'O-Methyl Cytosine
  modified_base (8)..(8): 2' Fluoro Guanosine
  modified_base (9)..(9): 2'O-Methyl Cytosine
  modified_base (10)..(10): 2' Fluoro Guanosine
  modified_base (11)..(11): 2'O-Methyl Cytosine
  modified_base (12)..(13): 2' Fluoro Guanosine
  modified_base (14)..(14): 2'O-Methyl Adenosine
  modified_base (15)..(16): 2' Fluoro Guanosine
  modified_base (17)..(17): 2'O-Methyl Cytosine
  modified_base (18)..(19): um
  modified_base (20)..(20): 2' Fluoro Guanosine
  modified_base (21)..(21): 2'O-Methyl Adenosine
  modified_base (22)..(23): 2' Fluoro Guanosine
  modified_base (24)..(24): um
  modified_base (25)..(25): 2'O-Methyl Adenosine
  modified_base (26)..(26): 2' Fluoro Guanosine
  modified_base (27)..(28): 2'O-Methyl Cytosine
  modified_base (29)..(29): 2' Fluoro Guanosine
  modified_base (30)..(32): um
  modified_base (33)..(33): 2'O-Methyl Adenosine
  modified_base (34)..(34): um
  modified_base (35)..(35): 2'O-Methyl Cytosine
  modified_base (36)..(36): 2'O-Methyl Adenosine

SEQ ID NO: 349 - RNA, 29 nt, Artificial Sequence
  Aptamer
  modified_base (1)..(1): gm
  modified_base (2)..(2): 2'O-Methyl Cytosine
  modified_base (3)..(4): gm
  modified_base (5)..(5): um
  modified_base (6)..(8): 2' Fluoro Guanosine
  modified_base (9)..(11): 2'O-Methyl Adenosine
  modified_base (12)..(12): um
  modified_base (13)..(13): 2' Fluoro Guanosine
  modified_base (14)..(14): um
  modified_base (15)..(15): 2' Fluoro Guanosine
  modified_base (16)..(16): 2'O-Methyl Adenosine
  modified_base (17)..(17): 2' Fluoro Guanosine
  modified_base (18)..(18): 2'O-Methyl Adenosine
  modified_base (19)..(19): um
  modified_base (20)..(22): 2' Fluoro Guanosine
  modified_base (23)..(24): um
  modified_base (25)..(25): gm
  modified_base (26)..(27): 2'O-Methyl Cytosine
  modified_base (28)..(28): gm
  modified_base (29)..(29): 2'O-Methyl Cytosine
  misc_feature (29)..(29): The 2'O-Methyl cytosine is attached through the linker hexaethylene glycol spacer to 2'O-Methyl cytosine of SEQ ID:350
gcggugggaaaugugagauggguugccgc

SEQ ID NO: 350 - RNA, 36 nt, Artificial Sequence; identical to SEQ ID NO: 9
  Aptamer
  modified_base (1)..(1): 2'O-Methyl Cytosine
  misc_feature (1)..(1): The 2'O-Methyl cytosine is attached through the linker hexaethylene glycol spacer to 2'O-Methyl cytosine of SEQ ID NO:349
  modified_base (2)..(2): gm
  modified_base (3)..(3): 2'O-Methyl Adenosine
  modified_base (4)..(4): 2'O-Methyl Cytosine
  modified_base (5)..(5): um
  modified_base (6)..(7): 2'O-Methyl Cytosine
  modified_base (8)..(8): 2' Fluoro Guanosine
  modified_base (9)..(9): 2'O-Methyl Cytosine
  modified_base (10)..(10): 2' Fluoro Guanosine
  modified_base (11)..(11): 2'O-Methyl Cytosine
  modified_base (12)..(13): 2' Fluoro Guanosine
  modified_base (14)..(14): 2'O-Methyl Adenosine
  modified_base (15)..(16): 2' Fluoro Guanosine
  modified_base (17)..(17): 2'O-Methyl Cytosine
  modified_base (18)..(19): um
  modified_base (20)..(20): 2' Fluoro Guanosine
  modified_base (21)..(21): 2'O-Methyl Adenosine
  modified_base (22)..(23): 2' Fluoro Guanosine
  modified_base (24)..(24): um
  modified_base (25)..(25): 2'O-Methyl Adenosine
  modified_base (26)..(26): 2' Fluoro Guanosine
  modified_base (27)..(28): 2'O-Methyl Cytosine
  modified_base (29)..(29): 2' Fluoro Guanosine
  modified_base (30)..(32): um
  modified_base (33)..(33): gm
  modified_base (34)..(34): um
  modified_base (35)..(35): 2'O-Methyl Cytosine
  modified_base (36)..(36): gm
  modified_base (36)..(36): inverted deoxythymidine incorporated at the 3'  end

SEQ ID NO: 351 - RNA, 29 nt, Artificial Sequence
  Aptamer
  modified_base (1)..(1): gm
  misc_feature (1)..(1): The 2'O-Methyl Guanosine is attached through the linker 1,3-propanediolspacer to 2'O-Methyl cytosine of SEQ ID NO:225
  misc_feature (1)..(1): The 2'O-Methyl Guanosine is attached through the linker 1,3-propanediolspacer to 2'O-Methyl cytosine of SEQ ID NO:225
  modified_base (2)..(2): 2'O-Methyl Cytosine
  modified_base (3)..(4): gm
  modified_base (5)..(5): um
  modified_base (6)..(8): 2' Fluoro Guanosine
  modified_base (9)..(11): 2'O-Methyl Adenosine
  modified_base (12)..(12): um
  modified_base (13)..(13): 2' Fluoro Guanosine
  modified_base (14)..(14): um
  modified_base (15)..(15): 2' Fluoro Guanosine
  modified_base (16)..(16): 2'O-Methyl Adenosine
  modified_base (17)..(17): 2' Fluoro Guanosine
  modified_base (18)..(18): 2'O-Methyl Adenosine
  modified_base (19)..(19): um
  modified_base (20)..(22): 2' Fluoro Guanosine
  modified_base (23)..(24): um
  modified_base (25)..(25): gm
  modified_base (26)..(27): 2'O-Methyl Cytosine
  modified_base (28)..(28): gm
  modified_base (29)..(29): 2'O-Methyl Cytosine
  modified_base (29)..(29): inverted deoxythymidine incorporated at the 3'  end
gcggugggaaaugugagauggguugccgc

SEQ ID NO: 352 - RNA, 29 nt, Artificial Sequence
  Aptamer
  modified_base (1)..(1): gm
  misc_feature (1)..(1): The 2'O-Methyl Guanosine is attached through the linker hexaethylene glycol spacer to 2'O-Methyl cytosine of SEQ ID:226
  modified_base (2)..(2): 2'O-Methyl Cytosine
  modified_base (3)..(4): gm
  modified_base (5)..(5): um
  modified_base (6)..(8): 2' Fluoro Guanosine
  modified_base (9)..(11): 2'O-Methyl Adenosine
  modified_base (12)..(12): um
  modified_base (13)..(13): 2' Fluoro Guanosine
  modified_base (14)..(14): um
  modified_base (15)..(15): 2' Fluoro Guanosine
  modified_base (16)..(16): 2'O-Methyl Adenosine
  modified_base (17)..(17): 2' Fluoro Guanosine
  modified_base (18)..(18): 2'O-Methyl Adenosine
  modified_base (19)..(19): um
  modified_base (20)..(22): 2' Fluoro Guanosine
  modified_base (23)..(24): um
  modified_base (25)..(25): gm
  modified_base (26)..(27): 2'O-Methyl Cytosine
  modified_base (28)..(28): gm
  modified_base (29)..(29): 2'O-Methyl Cytosine
  modified_base (29)..(29): inverted deoxythymidine incorporated at the 3'  end
gcggugggaaaugugagauggguugccgc

SEQ ID NO: 353 - RNA, 40 nt, Artificial Sequence; identical to SEQ ID NO: 110
  Aptamer
  modified_base (1)..(1): gm
  misc_feature (1)..(1): The 2'O-Methyl Guanosine is attached through the linker 1,3-propanediolspacer to 2'O-Methyl cytosine of SEQ ID NO:230
  modified_base (2)..(3): 2'O-Methyl Cytosine
  modified_base (4)..(4): gm
  modified_base (5)..(5): 2'O-Methyl Adenosine
  modified_base (6)..(6): 2'O-Methyl Cytosine
  modified_base (7)..(7): um
  modified_base (8)..(9): 2'O-Methyl Cytosine
  modified_base (10)..(10): 2' Fluoro Guanosine
  modified_base (11)..(11): 2'O-Methyl Cytosine
  modified_base (12)..(12): 2' Fluoro Guanosine
  modified_base (13)..(13): 2'O-Methyl Cytosine
  modified_base (14)..(15): 2' Fluoro Guanosine
  modified_base (16)..(16): 2'O-Methyl Adenosine
  modified_base (17)..(18): 2' Fluoro Guanosine
  modified_base (19)..(19): 2'O-Methyl Cytosine
  modified_base (20)..(21): um
  modified_base (22)..(22): 2' Fluoro Guanosine
  modified_base (23)..(23): 2'O-Methyl Adenosine
  modified_base (24)..(25): 2' Fluoro Guanosine
  modified_base (26)..(26): um
  modified_base (27)..(27): 2'O-Methyl Adenosine
  modified_base (28)..(28): 2' Fluoro Guanosine
  modified_base (29)..(30): 2'O-Methyl Cytosine
  modified_base (31)..(31): 2' Fluoro Guanosine
  modified_base (32)..(34): um
  modified_base (35)..(35): gm
  modified_base (36)..(36): um
  modified_base (37)..(37): 2'O-Methyl Cytosine
  modified_base (38)..(39): gm
  modified_base (40)..(40): 2'O-Methyl Cytosine
  modified_base (40)..(40): inverted deoxythymidine incorporated at the 3'  end

SEQ ID NO: 354 - RNA, 40 nt, Artificial Sequence; identical to SEQ ID NO: 110
  Aptamer
  modified_base (1)..(1): gm
  misc_feature (1)..(1): The 2'O-Methyl Guanosine is attached through the linker hexaethylene glycol spacer to 2'O-Methyl cytosine of SEQ ID:231
  modified_base (2)..(3): 2'O-Methyl Cytosine
  modified_base (4)..(4): gm
  modified_base (5)..(5): 2'O-Methyl Adenosine
  modified_base (6)..(6): 2'O-Methyl Cytosine
  modified_base (7)..(7): um
  modified_base (8)..(9): 2'O-Methyl Cytosine
  modified_base (10)..(10): 2' Fluoro Guanosine
  modified_base (11)..(11): 2'O-Methyl Cytosine
  modified_base (12)..(12): 2' Fluoro Guanosine
  modified_base (13)..(13): 2'O-Methyl Cytosine
  modified_base (14)..(15): 2' Fluoro Guanosine
  modified_base (16)..(16): 2'O-Methyl Adenosine
  modified_base (17)..(18): 2' Fluoro Guanosine
  modified_base (19)..(19): 2'O-Methyl Cytosine
  modified_base (20)..(21): um
  modified_base (22)..(22): 2' Fluoro Guanosine
  modified_base (23)..(23): 2'O-Methyl Adenosine
  modified_base (24)..(25): 2' Fluoro Guanosine
  modified_base (26)..(26): um
  modified_base (27)..(27): 2'O-Methyl Adenosine
  modified_base (28)..(28): 2' Fluoro Guanosine
  modified_base (29)..(30): 2'O-Methyl Cytosine
  modified_base (31)..(31): 2' Fluoro Guanosine
  modified_base (32)..(34): um
  modified_base (35)..(35): gm
  modified_base (36)..(36): um
  modified_base (37)..(37): 2'O-Methyl Cytosine
  modified_base (38)..(39): gm
  modified_base (40)..(40): 2'O-Methyl Cytosine
  modified_base (40)..(40): inverted deoxythymidine incorporated at the 3'  end

SEQ ID NO: 355 - RNA, 33 nt, Artificial Sequence; identical to SEQ ID NO: 193
  Aptamer
  modified_base (1)..(1): gm
  misc_feature (1)..(1): The 2'O-Methyl Guanosine is attached through the linker 1,3-propanediolspacer to2'O-Methyl Guanosine of SEQ ID NO:235
  modified_base (2)..(2): 2'O-Methyl Cytosine
  modified_base (3)..(3): gm
  modified_base (4)..(4): 2'O-Methyl Cytosine
  modified_base (5)..(6): gm
  modified_base (8)..(10): 2' Fluoro Guanosine
  modified_base (11)..(13): 2'O-Methyl Adenosine
  modified_base (15)..(15): 2' Fluoro Guanosine
  modified_base (17)..(17): 2' Fluoro Guanosine
  modified_base (18)..(18): 2'O-Methyl Adenosine
  modified_base (19)..(19): 2' Fluoro Guanosine
  modified_base (20)..(20): 2'O-Methyl Adenosine
  modified_base (22)..(24): 2' Fluoro Guanosine
  modified_base (27)..(27): gm
  modified_base (28)..(29): 2'O-Methyl Cytosine
  modified_base (30)..(30): gm
  modified_base (31)..(31): 2'O-Methyl Cytosine
  modified_base (32)..(32): gm
  modified_base (33)..(33): 2'O-Methyl Cytosine
  modified_base (33)..(33): inverted deoxythymidine incorporated at the 3'  end

SEQ ID NO: 356 - RNA, 33 nt, Artificial Sequence; identical to SEQ ID NO: 193
  aptamer
  modified_base (1)..(1): gm
  misc_feature (1)..(1): The 2'O-Methyl Guanosine is attached through the linker hexaethylene glycol spacer to  2'O-Methyl Guanosine of SEQ ID NO:236
  modified_base (2)..(2): 2'O-Methyl Cytosine
  modified_base (3)..(3): gm
  modified_base (4)..(4): 2'O-Methyl Cytosine
  modified_base (5)..(6): gm
  modified_base (7)..(7): um
  modified_base (8)..(10): 2' Fluoro Guanosine
  modified_base (11)..(13): 2'O-Methyl Adenosine
  modified_base (14)..(14): um
  modified_base (15)..(15): 2' Fluoro Guanosine
  modified_base (16)..(16): um
  modified_base (17)..(17): 2' Fluoro Guanosine
  modified_base (18)..(18): 2'O-Methyl Adenosine
  modified_base (19)..(19): 2' Fluoro Guanosine
  modified_base (20)..(20): 2'O-Methyl Adenosine
  modified_base (21)..(21): um
  modified_base (22)..(24): 2' Fluoro Guanosine
  modified_base (25)..(26): um
  modified_base (27)..(27): gm
  modified_base (28)..(29): 2'O-Methyl Cytosine
  modified_base (30)..(30): gm
  modified_base (31)..(31): 2'O-Methyl Cytosine
  modified_base (32)..(32): gm
  modified_base (33)..(33): 2'O-Methyl Cytosine
  modified_base (33)..(33): inverted deoxythymidine incorporated at the 3'  end

SEQ ID NO: 357 - RNA, 40 nt, Artificial Sequence; identical to SEQ ID NO: 110
  aptamer
  modified_base (1)..(1): gm
  misc_feature (1)..(1): The 2'O-Methyl Guanosine is attached through the linker 1,3-propanediolspacer to 2'O-Methyl cytosine of SEQ ID NO:240
  modified_base (2)..(3): 2'O-Methyl Cytosine
  modified_base (4)..(4): gm
  modified_base (5)..(5): 2'O-Methyl Adenosine
  modified_base (6)..(6): 2'O-Methyl Cytosine
  modified_base (7)..(7): um
  modified_base (8)..(9): 2'O-Methyl Cytosine
  modified_base (10)..(10): 2' Fluoro Guanosine
  modified_base (11)..(11): 2'O-Methyl Cytosine
  modified_base (12)..(12): 2' Fluoro Guanosine
  modified_base (13)..(13): 2'O-Methyl Cytosine
  modified_base (14)..(15): 2' Fluoro Guanosine
  modified_base (16)..(16): 2'O-Methyl Adenosine
  modified_base (17)..(18): 2' Fluoro Guanosine
  modified_base (19)..(19): 2'O-Methyl Cytosine
  modified_base (20)..(21): um
  modified_base (22)..(22): 2' Fluoro Guanosine
  modified_base (23)..(23): 2'O-Methyl Adenosine
  modified_base (24)..(25): 2' Fluoro Guanosine
  modified_base (26)..(26): um
  modified_base (27)..(27): 2'O-Methyl Adenosine
  modified_base (28)..(28): 2' Fluoro Guanosine
  modified_base (29)..(30): 2'O-Methyl Cytosine
  modified_base (31)..(31): 2' Fluoro Guanosine
  modified_base (32)..(34): um
  modified_base (35)..(35): gm
  modified_base (36)..(36): um
  modified_base (37)..(37): 2'O-Methyl Cytosine
  modified_base (38)..(39): gm
  modified_base (40)..(40): 2'O-Methyl Cytosine
  modified_base (40)..(40): inverted deoxythymidine incorporated at the 3'  end

SEQ ID NO: 358 - RNA, 40 nt, Artificial Sequence; identical to SEQ ID NO: 110
  aptamer
  modified_base (1)..(1): gm
  misc_feature (1)..(1): The 2'O-Methyl Guanosine is attached through the linker hexaethylene glycol spacer to 2'O-Methyl cytosine of SEQ ID:241
  modified_base (2)..(3): 2'O-Methyl Cytosine
  modified_base (4)..(4): gm
  modified_base (5)..(5): 2'O-Methyl Adenosine
  modified_base (6)..(6): 2'O-Methyl Cytosine
  modified_base (7)..(7): um
  modified_base (8)..(9): 2'O-Methyl Cytosine
  modified_base (10)..(10): 2' Fluoro Guanosine
  modified_base (11)..(11): 2'O-Methyl Cytosine
  modified_base (12)..(12): 2' Fluoro Guanosine
  modified_base (13)..(13): 2'O-Methyl Cytosine
  modified_base (14)..(15): 2' Fluoro Guanosine
  modified_base (16)..(16): 2'O-Methyl Adenosine
  modified_base (17)..(18): 2' Fluoro Guanosine
  modified_base (19)..(19): 2'O-Methyl Cytosine
  modified_base (20)..(21): um
  modified_base (22)..(22): 2' Fluoro Guanosine
  modified_base (23)..(23): 2'O-Methyl Adenosine
  modified_base (24)..(25): 2' Fluoro Guanosine
  modified_base (26)..(26): um
  modified_base (27)..(27): 2'O-Methyl Adenosine
  modified_base (28)..(28): 2' Fluoro Guanosine
  modified_base (29)..(30): 2'O-Methyl Cytosine
  modified_base (31)..(31): 2' Fluoro Guanosine
  modified_base (32)..(34): um
  modified_base (35)..(35): gm
  modified_base (36)..(36): um
  modified_base (37)..(37): 2'O-Methyl Cytosine
  modified_base (38)..(39): gm
  modified_base (40)..(40): 2'O-Methyl Cytosine
  modified_base (40)..(40): inverted deoxythymidine incorporated at the 3'  end

SEQ ID NO: 359 - RNA, 33 nt, Artificial Sequence; identical to SEQ ID NO: 193
  aptamer
  modified_base (1)..(1): gm
  misc_feature (1)..(1): The 2'O-Methyl guanosine is attached through the linker 1,3-propanediolspacer to 2'O-Methyl cytosine of SEQ ID NO: 245
  modified_base (2)..(2): 2'O-Methyl Cytosine
  modified_base (3)..(3): gm
  modified_base (4)..(4): 2'O-Methyl Cytosine
  modified_base (5)..(6): gm
  modified_base (7)..(7): um
  modified_base (8)..(10): 2' Fluoro Guanosine
  modified_base (11)..(13): 2'O-Methyl Adenosine
  modified_base (14)..(14): um
  modified_base (15)..(15): 2' Fluoro Guanosine
  modified_base (16)..(16): um
  modified_base (17)..(17): 2' Fluoro Guanosine
  modified_base (18)..(18): 2'O-Methyl Adenosine
  modified_base (19)..(19): 2' Fluoro Guanosine
  modified_base (20)..(20): 2'O-Methyl Adenosine
  modified_base (21)..(21): um
  modified_base (22)..(24): 2' Fluoro Guanosine
  modified_base (25)..(26): um
  modified_base (27)..(27): gm
  modified_base (28)..(29): 2'O-Methyl Cytosine
  modified_base (30)..(30): gm
  modified_base (31)..(31): 2'O-Methyl Cytosine
  modified_base (32)..(32): gm
  modified_base (33)..(33): 2'O-Methyl Cytosine
  modified_base (33)..(33): inverted deoxythymidine incorporated at the 3'  end

SEQ ID NO: 360 - RNA, 33 nt, Artificial Sequence; identical to SEQ ID NO: 193
  Aptamer
  modified_base (1)..(1): gm
  misc_feature (1)..(1): The 2'O-Methyl guanosine is attached through the linker hexaethylene glycol spacer to 2'O-Methyl cytosine  of SEQ ID NO: 246
  modified_base (2)..(2): 2'O-Methyl Cytosine
  modified_base (3)..(3): gm
  modified_base (4)..(4): 2'O-Methyl Cytosine
  modified_base (5)..(6): gm
  modified_base (7)..(7): um
  modified_base (8)..(10): 2' Fluoro Guanosine
  modified_base (11)..(13): 2'O-Methyl Adenosine
  modified_base (14)..(14): um
  modified_base (15)..(15): 2' Fluoro Guanosine
  modified_base (16)..(16): um
  modified_base (17)..(17): 2' Fluoro Guanosine
  modified_base (18)..(18): 2'O-Methyl Adenosine
  modified_base (19)..(19): 2' Fluoro Guanosine
  modified_base (20)..(20): 2'O-Methyl Adenosine
  modified_base (21)..(21): um
  modified_base (22)..(24): 2' Fluoro Guanosine
  modified_base (25)..(26): um
  modified_base (27)..(27): gm
  modified_base (28)..(29): 2'O-Methyl Cytosine
  modified_base (30)..(30): gm
  modified_base (31)..(31): 2'O-Methyl Cytosine
  modified_base (32)..(32): gm
  modified_base (33)..(33): 2'O-Methyl Cytosine
  modified_base (33)..(33): inverted deoxythymidine incorporated at the 3'  end

SEQ ID NO: 361 - skipped

SEQ ID NO: 362 - RNA, 29 nt, Artificial Sequence
  Aptamer
  modified_base (1)..(1): gm
  misc_feature (1)..(1): The 2'O-Methyl Guanosine is  is attached through the linker 1,3-propanediol spacer to 2'O-Methyl Guanosine of SEQ ID NO:255
  modified_base (2)..(2): 2'O-Methyl Cytosine
  modified_base (3)..(4): gm
  modified_base (5)..(5): um
  modified_base (6)..(8): 2' Fluoro Guanosine
  modified_base (9)..(11): 2'O-Methyl Adenosine
  modified_base (12)..(12): um
  modified_base (13)..(13): 2' Fluoro Guanosine
  modified_base (14)..(14): um
  modified_base (15)..(15): 2' Fluoro Guanosine
  modified_base (16)..(16): 2'O-Methyl Adenosine
  modified_base (17)..(17): 2' Fluoro Guanosine
  modified_base (18)..(18): 2'O-Methyl Adenosine
  modified_base (19)..(19): um
  modified_base (20)..(22): 2' Fluoro Guanosine
  modified_base (23)..(24): um
  modified_base (25)..(25): gm
  modified_base (26)..(27): 2'O-Methyl Cytosine
  modified_base (28)..(28): gm
  modified_base (29)..(29): 2'O-Methyl Cytosine
  modified_base (29)..(29): inverted deoxythymidine incorporated at the 3'  end
gcggugggaaaugugagauggguugccgc

SEQ ID NO: 363 - RNA, 29 nt, Artificial Sequence
  Aptamer
  modified_base (1)..(1): gm
  misc_feature (1)..(1): The 2'O-Methyl Guanosine is attached through the linker Hexaethyleneglycol spacer to 2'O-Methyl Guanosine SEQ ID NO:256
  misc_feature (1)..(1): The 2'O-Methyl Guanosine is attached through the linker Hexaethyleneglycol spacer to 2'O-Methyl Guanosine SEQ ID NO:256
  modified_base (2)..(2): 2'O-Methyl Cytosine
  modified_base (3)..(4): gm
  modified_base (5)..(5): um
  modified_base (6)..(8): 2' Fluoro Guanosine
  modified_base (9)..(11): 2'O-Methyl Adenosine
  modified_base (12)..(12): um
  modified_base (13)..(13): 2' Fluoro Guanosine
  modified_base (14)..(14): um
  modified_base (15)..(15): 2' Fluoro Guanosine
  modified_base (16)..(16): 2'O-Methyl Adenosine
  modified_base (17)..(17): 2' Fluoro Guanosine
  modified_base (18)..(18): 2'O-Methyl Adenosine
  modified_base (19)..(19): um
  modified_base (20)..(22): 2' Fluoro Guanosine
  modified_base (23)..(24): um
  modified_base (25)..(25): gm
  modified_base (26)..(27): 2'O-Methyl Cytosine
  modified_base (28)..(28): gm
  modified_base (29)..(29): 2'O-Methyl Cytosine
  modified_base (29)..(29): inverted deoxythymidine incorporated at the 3'  end
gcggugggaaaugugagauggguugccgc

SEQ ID NO: 364 - RNA, 31 nt, Artificial Sequence; identical to SEQ ID NO: 20
  Aptamer
  modified_base (1)..(1): 2'O-Methyl Cytosine
  misc_feature (1)..(1): The 2'O-Methyl cytosine is attached through the linker 1,3-propanediol spacer to 2'O-Methyl cytosine of SEQ ID NO:259
  modified_base (3)..(3): 2' Fluoro Guanosine
  modified_base (4)..(4): 2'O-Methyl Cytosine
  modified_base (5)..(5): 2' Fluoro Guanosine
  modified_base (6)..(6): 2'O-Methyl Cytosine
  modified_base (7)..(8): 2' Fluoro Guanosine
  modified_base (9)..(9): 2'O-Methyl Adenosine
  modified_base (10)..(11): 2' Fluoro Guanosine
  modified_base (12)..(12): 2'O-Methyl Cytosine
  modified_base (13)..(14): um
  modified_base (15)..(15): 2' Fluoro Guanosine
  modified_base (16)..(16): 2'O-Methyl Adenosine
  modified_base (17)..(18): 2' Fluoro Guanosine
  modified_base (19)..(19): um
  modified_base (20)..(20): 2'O-Methyl Adenosine
  modified_base (21)..(21): 2' Fluoro Guanosine
  modified_base (22)..(23): 2'O-Methyl Cytosine
  modified_base (24)..(24): 2' Fluoro Guanosine
  modified_base (25)..(27): um
  modified_base (28)..(28): gm
  modified_base (29)..(29): um
  modified_base (30)..(30): 2'O-Methyl Cytosine
  modified_base (31)..(31): gm
  modified_base (31)..(31): inverted deoxythymidine incorporated at the 3'  end

SEQ ID NO: 365 - RNA, 31 nt, Artificial Sequence; identical to SEQ ID NO: 20
  Aptamer
  modified_base (1)..(1): 2'O-Methyl Cytosine
  misc_feature (1)..(1): The 2'O-Methyl cytosine is attached through the linker 1,3-propanediol spacer to 2'O-Methyl cytosine of another nucleotide sequence CXAC
  modified_base (3)..(3): 2' Fluoro Guanosine
  modified_base (4)..(4): 2'O-Methyl Cytosine
  modified_base (5)..(5): 2' Fluoro Guanosine
  modified_base (6)..(6): 2'O-Methyl Cytosine
  modified_base (7)..(8): 2' Fluoro Guanosine
  modified_base (9)..(9): 2'O-Methyl Adenosine
  modified_base (10)..(11): 2' Fluoro Guanosine
  modified_base (12)..(12): 2'O-Methyl Cytosine
  modified_base (13)..(14): um
  modified_base (15)..(15): 2' Fluoro Guanosine
  modified_base (16)..(16): 2'O-Methyl Adenosine
  modified_base (17)..(18): 2' Fluoro Guanosine
  modified_base (19)..(19): um
  modified_base (20)..(20): 2'O-Methyl Adenosine
  modified_base (21)..(21): 2' Fluoro Guanosine
  modified_base (22)..(23): 2'O-Methyl Cytosine
  modified_base (24)..(24): 2' Fluoro Guanosine
  modified_base (25)..(27): um
  modified_base (28)..(28): gm
  modified_base (29)..(29): um
  modified_base (30)..(30): 2'O-Methyl Cytosine
  modified_base (31)..(31): gm
  modified_base (31)..(31): inverted deoxythymidine incorporated at the 3'  end

SEQ ID NO: 366 - RNA, 31 nt, Artificial Sequence; identical to SEQ ID NO: 20
  Aptamer
  modified_base (1)..(1): 2'O-Methyl Cytosine
  misc_feature (1)..(1): The 2'O-Methyl cytosine is attached through the linker 1,3-propanediol spacer to 2'O-Methyl cytosine of another nucleotide sequence CXAC
  modified_base (3)..(3): 2' Fluoro Guanosine
  modified_base (4)..(4): 2'O-Methyl Cytosine
  modified_base (5)..(5): 2' Fluoro Guanosine
  modified_base (6)..(6): 2'O-Methyl Cytosine
  modified_base (7)..(8): 2' Fluoro Guanosine
  modified_base (9)..(9): 2'O-Methyl Adenosine
  modified_base (10)..(11): 2' Fluoro Guanosine
  modified_base (12)..(12): 2'O-Methyl Cytosine
  modified_base (13)..(14): um
  modified_base (15)..(15): 2' Fluoro Guanosine
  modified_base (16)..(16): 2'O-Methyl Adenosine
  modified_base (17)..(18): 2' Fluoro Guanosine
  modified_base (19)..(19): um
  modified_base (20)..(20): 2'O-Methyl Adenosine
  modified_base (21)..(21): 2' Fluoro Guanosine
  modified_base (22)..(23): 2'O-Methyl Cytosine
  modified_base (24)..(24): 2' Fluoro Guanosine
  modified_base (25)..(27): um
  modified_base (28)..(28): gm
  modified_base (29)..(29): um
  modified_base (30)..(30): 2'O-Methyl Cytosine
  modified_base (31)..(31): gm
  modified_base (31)..(31): inverted deoxythymidine incorporated at the 3'  end

SEQ ID NO: 367 - RNA, 31 nt, Artificial Sequence; identical to SEQ ID NO: 20
  Aptamer
  modified_base (1)..(1): 2'O-Methyl Cytosine
  misc_feature (1)..(1): The 2'O-Methyl cytosine is attached through the linker 1,3-propanediol spacer to 2'O-Methyl cytosine of SEQ ID NO:262
  modified_base (3)..(3): 2' Fluoro Guanosine
  modified_base (4)..(4): 2'O-Methyl Cytosine
  modified_base (5)..(5): 2' Fluoro Guanosine
  modified_base (6)..(6): 2'O-Methyl Cytosine
  modified_base (7)..(8): 2' Fluoro Guanosine
  modified_base (9)..(9): 2'O-Methyl Adenosine
  modified_base (10)..(11): 2' Fluoro Guanosine
  modified_base (12)..(12): 2'O-Methyl Cytosine
  modified_base (13)..(14): um
  modified_base (15)..(15): 2' Fluoro Guanosine
  modified_base (16)..(16): 2'O-Methyl Adenosine
  modified_base (17)..(18): 2' Fluoro Guanosine
  modified_base (19)..(19): um
  modified_base (20)..(20): 2'O-Methyl Adenosine
  modified_base (21)..(21): 2' Fluoro Guanosine
  modified_base (22)..(23): 2'O-Methyl Cytosine
  modified_base (24)..(24): 2' Fluoro Guanosine
  modified_base (25)..(27): um
  modified_base (28)..(28): gm
  modified_base (29)..(29): um
  modified_base (30)..(30): 2'O-Methyl Cytosine
  modified_base (31)..(31): gm
  modified_base (31)..(31): inverted deoxythymidine incorporated at the 3'  end

SEQ ID NO: 368 - RNA, 31 nt, Artificial Sequence; identical to SEQ ID NO: 20
  Aptamer
  modified_base (1)..(1): 2'O-Methyl Cytosine
  misc_feature (1)..(1): The 2'O-Methyl cytosine is attached through the linker 1,3-propanediol spacer to 2'O-Methyl cytosine of SEQ ID NO:263
  modified_base (3)..(3): 2' Fluoro Guanosine
  modified_base (4)..(4): 2'O-Methyl Cytosine
  modified_base (5)..(5): 2' Fluoro Guanosine
  modified_base (6)..(6): 2'O-Methyl Cytosine
  modified_base (7)..(8): 2' Fluoro Guanosine
  modified_base (9)..(9): 2'O-Methyl Adenosine
  modified_base (10)..(11): 2' Fluoro Guanosine
  modified_base (12)..(12): 2'O-Methyl Cytosine
  modified_base (13)..(14): um
  modified_base (15)..(15): 2' Fluoro Guanosine
  modified_base (16)..(16): 2'O-Methyl Adenosine
  modified_base (17)..(18): 2' Fluoro Guanosine
  modified_base (19)..(19): um
  modified_base (20)..(20): 2'O-Methyl Adenosine
  modified_base (21)..(21): 2' Fluoro Guanosine
  modified_base (22)..(23): 2'O-Methyl Cytosine
  modified_base (24)..(24): 2' Fluoro Guanosine
  modified_base (25)..(27): um
  modified_base (28)..(28): gm
  modified_base (29)..(29): um
  modified_base (30)..(30): 2'O-Methyl Cytosine
  modified_base (31)..(31): gm
  modified_base (31)..(31): inverted deoxythymidine incorporated at the 3'  end

SEQ ID NO: 369 - RNA, 29 nt, Artificial Sequence
  Aptamer
  modified_base (1)..(1): gm
  misc_feature (1)..(1): The 2'O-Methyl Guanosine is attached through the linker 1,3-propanediol spacer to 2'O-Methyl cytosine of SEQ ID NO:265
  modified_base (2)..(2): 2'O-Methyl Cytosine
  modified_base (3)..(4): gm
  modified_base (5)..(5): um
  modified_base (6)..(8): 2' Fluoro Guanosine
  modified_base (9)..(11): 2'O-Methyl Adenosine
  modified_base (12)..(12): um
  modified_base (13)..(13): 2' Fluoro Guanosine
  modified_base (14)..(14): um
  modified_base (15)..(15): 2' Fluoro Guanosine
  modified_base (16)..(16): 2'O-Methyl Adenosine
  modified_base (17)..(17): 2' Fluoro Guanosine
  modified_base (18)..(18): 2'O-Methyl Adenosine
  modified_base (19)..(19): um
  modified_base (20)..(22): 2' Fluoro Guanosine
  modified_base (23)..(24): um
  modified_base (25)..(25): gm
  modified_base (26)..(27): 2'O-Methyl Cytosine
  modified_base (28)..(28): gm
  modified_base (29)..(29): 2'O-Methyl Cytosine
  modified_base (29)..(29): inverted deoxythymidine incorporated at the 3'  end
gcggugggaaaugugagauggguugccgc

SEQ ID NO: 370 - RNA, 29 nt, Artificial Sequence
  Aptamer
  modified_base (1)..(1): gm
  misc_feature (1)..(1): The 2'O-Methyl Guanosine is attached through the linker hexaethylene glycol spacer to 2'O-Methyl cytosine of SEQ ID:266
  modified_base (2)..(2): 2'O-Methyl Cytosine
  modified_base (3)..(4): gm
  modified_base (5)..(5): um
  modified_base (6)..(8): 2' Fluoro Guanosine
  modified_base (9)..(11): 2'O-Methyl Adenosine
  modified_base (12)..(12): um
  modified_base (13)..(13): 2' Fluoro Guanosine
  modified_base (14)..(14): um
  modified_base (15)..(15): 2' Fluoro Guanosine
  modified_base (16)..(16): 2'O-Methyl Adenosine
  modified_base (17)..(17): 2' Fluoro Guanosine
  modified_base (18)..(18): 2'O-Methyl Adenosine
  modified_base (19)..(19): um
  modified_base (20)..(22): 2' Fluoro Guanosine
  modified_base (23)..(24): um
  modified_base (25)..(25): gm
  modified_base (26)..(27): 2'O-Methyl Cytosine
  modified_base (28)..(28): gm
  modified_base (29)..(29): 2'O-Methyl Cytosine
  modified_base (29)..(29): inverted deoxythymidine incorporated at the 3'  end
gcggugggaaaugugagauggguugccgc

SEQ ID NO: 371 - RNA, 33 nt, Artificial Sequence; identical to SEQ ID NO: 152
  Aptamer
  modified_base (1)..(2): 2'O-Methyl Cytosine
  misc_feature (1)..(1): The 2'O-Methyl cytosine is attached through the linker 1,3-propanediolspacer to 2'O-Methyl cytosine of SEQ ID NO:269
  modified_base (3)..(3): 2' Fluoro Guanosine
  modified_base (4)..(4): 2'O-Methyl Cytosine
  modified_base (5)..(5): 2' Fluoro Guanosine
  modified_base (6)..(6): 2'O-Methyl Cytosine
  modified_base (7)..(8): 2' Fluoro Guanosine
  modified_base (9)..(9): 2'O-Methyl Adenosine
  modified_base (10)..(11): 2' Fluoro Guanosine
  modified_base (12)..(12): 2'O-Methyl Cytosine
  modified_base (13)..(14): um
  modified_base (15)..(15): 2' Fluoro Guanosine
  modified_base (16)..(16): 2'O-Methyl Adenosine
  modified_base (17)..(18): 2' Fluoro Guanosine
  modified_base (19)..(19): um
  modified_base (20)..(20): 2'O-Methyl Adenosine
  modified_base (21)..(21): 2' Fluoro Guanosine
  modified_base (22)..(23): 2'O-Methyl Cytosine
  modified_base (24)..(24): 2' Fluoro Guanosine
  modified_base (25)..(27): um
  modified_base (28)..(28): gm
  modified_base (29)..(29): um
  modified_base (30)..(30): 2'O-Methyl Cytosine
  modified_base (31)..(32): gm
  modified_base (33)..(33): 2'O-Methyl Cytosine
  modified_base (33)..(33): inverted deoxythymidine incorporated at the 3'  end

SEQ ID NO: 372 - RNA, 33 nt, Artificial Sequence; identical to SEQ ID NO: 152
  Aptamer
  modified_base (1)..(2): 2'O-Methyl Cytosine
  misc_feature (1)..(1): The 2'O-Methyl cytosine is attached through the linker 1,3-propanediolspacer to 2'O-Methyl cytosine of another nucleotide sequence XCCXAC
  modified_base (3)..(3): 2' Fluoro Guanosine
  modified_base (4)..(4): 2'O-Methyl Cytosine
  modified_base (5)..(5): 2' Fluoro Guanosine
  modified_base (6)..(6): 2'O-Methyl Cytosine
  modified_base (7)..(8): 2' Fluoro Guanosine
  modified_base (9)..(9): 2'O-Methyl Adenosine
  modified_base (10)..(11): 2' Fluoro Guanosine
  modified_base (12)..(12): 2'O-Methyl Cytosine
  modified_base (13)..(14): um
  modified_base (15)..(15): 2' Fluoro Guanosine
  modified_base (16)..(16): 2'O-Methyl Adenosine
  modified_base (17)..(18): 2' Fluoro Guanosine
  modified_base (19)..(19): um
  modified_base (20)..(20): 2'O-Methyl Adenosine
  modified_base (21)..(21): 2' Fluoro Guanosine
  modified_base (22)..(23): 2'O-Methyl Cytosine
  modified_base (24)..(24): 2' Fluoro Guanosine
  modified_base (25)..(27): um
  modified_base (28)..(28): gm
  modified_base (29)..(29): um
  modified_base (30)..(30): 2'O-Methyl Cytosine
  modified_base (31)..(32): gm
  modified_base (33)..(33): 2'O-Methyl Cytosine
  modified_base (33)..(33): inverted deoxythymidine incorporated at the 3'  end

SEQ ID NO: 373 - RNA, 33 nt, Artificial Sequence; identical to SEQ ID NO: 152
  Aptamer
  modified_base (1)..(2): 2'O-Methyl Cytosine
  modified_base (1)..(1): The 2'O-Methyl cytosine is attached through the linker 1,3-propanediolspacer to 2'O-Methyl cytosine of another nucleotide sequence XCCXAC
  modified_base (3)..(3): 2' Fluoro Guanosine
  modified_base (4)..(4): 2'O-Methyl Cytosine
  modified_base (5)..(5): 2' Fluoro Guanosine
  modified_base (6)..(6): 2'O-Methyl Cytosine
  modified_base (7)..(8): 2' Fluoro Guanosine
  modified_base (9)..(9): 2'O-Methyl Adenosine
  modified_base (10)..(11): 2' Fluoro Guanosine
  modified_base (12)..(12): 2'O-Methyl Cytosine
  modified_base (13)..(14): um
  modified_base (15)..(15): 2' Fluoro Guanosine
  modified_base (16)..(16): 2'O-Methyl Adenosine
  modified_base (17)..(18): 2' Fluoro Guanosine
  modified_base (19)..(19): um
  modified_base (20)..(20): 2'O-Methyl Adenosine
  modified_base (21)..(21): 2' Fluoro Guanosine
  modified_base (22)..(23): 2'O-Methyl Cytosine
  modified_base (24)..(24): 2' Fluoro Guanosine
  modified_base (25)..(27): um
  modified_base (28)..(28): gm
  modified_base (29)..(29): um
  modified_base (30)..(30): 2'O-Methyl Cytosine
  modified_base (31)..(32): gm
  modified_base (33)..(33): 2'O-Methyl Cytosine
  modified_base (33)..(33): inverted deoxythymidine incorporated at the 3'  end

SEQ ID NO: 374 - RNA, 33 nt, Artificial Sequence; identical to SEQ ID NO: 152
  Aptamer
  modified_base (1)..(2): 2'O-Methyl Cytosine
  misc_feature (1)..(1): The 2'O-Methyl cytosine is attached through the linker 1,3-propanediolspacer to 2'O-Methyl cytosine of SEQ ID NO:272
  modified_base (3)..(3): 2' Fluoro Guanosine
  modified_base (4)..(4): 2'O-Methyl Cytosine
  modified_base (5)..(5): 2' Fluoro Guanosine
  modified_base (6)..(6): 2'O-Methyl Cytosine
  modified_base (7)..(8): 2' Fluoro Guanosine
  modified_base (9)..(9): 2'O-Methyl Adenosine
  modified_base (10)..(11): 2' Fluoro Guanosine
  modified_base (12)..(12): 2'O-Methyl Cytosine
  modified_base (13)..(14): um
  modified_base (15)..(15): 2' Fluoro Guanosine
  modified_base (16)..(16): 2'O-Methyl Adenosine
  modified_base (17)..(18): 2' Fluoro Guanosine
  modified_base (19)..(19): um
  modified_base (20)..(20): 2'O-Methyl Adenosine
  modified_base (21)..(21): 2' Fluoro Guanosine
  modified_base (22)..(23): 2'O-Methyl Cytosine
  modified_base (24)..(24): 2' Fluoro Guanosine
  modified_base (25)..(27): um
  modified_base (28)..(28): gm
  modified_base (29)..(29): um
  modified_base (30)..(30): 2'O-Methyl Cytosine
  modified_base (31)..(32): gm
  modified_base (33)..(33): 2'O-Methyl Cytosine
  modified_base (33)..(33): inverted deoxythymidine incorporated at the 3'  end

SEQ ID NO: 375 - RNA, 33 nt, Artificial Sequence; identical to SEQ ID NO: 152
  Aptamer
  modified_base (1)..(2): 2'O-Methyl Cytosine
  misc_feature (1)..(1): The 2'O-Methyl cytosine is attached through the linker 1,3-propanediolspacer to 2'O-Methyl cytosine of SEQ ID NO:273
  modified_base (3)..(3): 2' Fluoro Guanosine
  modified_base (4)..(4): 2'O-Methyl Cytosine
  modified_base (5)..(5): 2' Fluoro Guanosine
  modified_base (6)..(6): 2'O-Methyl Cytosine
  modified_base (7)..(8): 2' Fluoro Guanosine
  modified_base (9)..(9): 2'O-Methyl Adenosine
  modified_base (10)..(11): 2' Fluoro Guanosine
  modified_base (12)..(12): 2'O-Methyl Cytosine
  modified_base (13)..(14): um
  modified_base (15)..(15): 2' Fluoro Guanosine
  modified_base (16)..(16): 2'O-Methyl Adenosine
  modified_base (17)..(18): 2' Fluoro Guanosine
  modified_base (19)..(19): um
  modified_base (20)..(20): 2'O-Methyl Adenosine
  modified_base (21)..(21): 2' Fluoro Guanosine
  modified_base (22)..(23): 2'O-Methyl Cytosine
  modified_base (24)..(24): 2' Fluoro Guanosine
  modified_base (25)..(27): um
  modified_base (28)..(28): gm
  modified_base (29)..(29): um
  modified_base (30)..(30): 2'O-Methyl Cytosine
  modified_base (31)..(32): gm
  modified_base (33)..(33): 2'O-Methyl Cytosine
  modified_base (33)..(33): inverted deoxythymidine incorporated at the 3'  end

SEQ ID NO: 376 - RNA, 33 nt, Artificial Sequence; identical to SEQ ID NO: 193
  Aptamer
  modified_base (1)..(1): gm
  misc_feature (1)..(1): The 2'O-Methyl Guanosine is attached through the linker 1,3-propanediolspacer to 2'O-Methyl Guanosine of SEQ ID NO:275
  modified_base (2)..(2): 2'O-Methyl Cytosine
  modified_base (3)..(3): gm
  modified_base (4)..(4): 2'O-Methyl Cytosine
  modified_base (5)..(6): gm
  modified_base (7)..(7): um
  modified_base (8)..(10): 2' Fluoro Guanosine
  modified_base (11)..(13): 2'O-Methyl Adenosine
  modified_base (14)..(14): um
  modified_base (15)..(15): 2' Fluoro Guanosine
  modified_base (16)..(16): um
  modified_base (17)..(17): 2' Fluoro Guanosine
  modified_base (18)..(18): 2'O-Methyl Adenosine
  modified_base (19)..(19): 2' Fluoro Guanosine
  modified_base (20)..(20): 2'O-Methyl Adenosine
  modified_base (21)..(21): um
  modified_base (22)..(24): 2' Fluoro Guanosine
  modified_base (25)..(26): um
  modified_base (27)..(27): gm
  modified_base (28)..(29): 2'O-Methyl Cytosine
  modified_base (30)..(30): gm
  modified_base (31)..(31): 2'O-Methyl Cytosine
  modified_base (32)..(32): gm
  modified_base (33)..(33): inverted deoxythymidine incorporated at the 3'  end

SEQ ID NO: 377 - RNA, 33 nt, Artificial Sequence; identical to SEQ ID NO: 193
  Aptamer
  modified_base (1)..(1): gm
  misc_feature (1)..(1): The 2'O-Methyl guanosine is attached through the linker 1,3-propanediolspacer to 2'O-Methyl  guanosine of SEQ ID NO: 276
  modified_base (2)..(2): 2'O-Methyl Cytosine
  modified_base (3)..(3): gm
  modified_base (4)..(4): 2'O-Methyl Cytosine
  modified_base (5)..(6): gm
  modified_base (7)..(7): um
  modified_base (8)..(10): 2' Fluoro Guanosine
  modified_base (11)..(13): 2'O-Methyl Adenosine
  modified_base (14)..(14): um
  modified_base (15)..(15): 2' Fluoro Guanosine
  modified_base (16)..(16): um
  modified_base (17)..(17): 2' Fluoro Guanosine
  modified_base (18)..(18): 2'O-Methyl Adenosine
  modified_base (19)..(19): 2' Fluoro Guanosine
  modified_base (20)..(20): 2'O-Methyl Adenosine
  modified_base (21)..(21): um
  modified_base (22)..(24): 2' Fluoro Guanosine
  modified_base (25)..(26): um
  modified_base (27)..(27): gm
  modified_base (28)..(29): 2'O-Methyl Cytosine
  modified_base (30)..(30): gm
  modified_base (31)..(31): 2'O-Methyl Cytosine
  modified_base (32)..(32): gm
  modified_base (33)..(33): 2'O-Methyl Cytosine
  modified_base (33)..(33): inverted deoxythymidine incorporated at the 3'  end

SEQ ID NO: 378 - RNA, 31 nt, Artificial Sequence; identical to SEQ ID NO: 20
  Aptamer
  modified_base (1)..(1): 2'O-Methyl Cytosine
  modified_base (3)..(3): 2' Fluoro Guanosine
  modified_base (4)..(4): 2'O-Methyl Cytosine
  modified_base (5)..(5): 2' Fluoro Guanosine
  modified_base (6)..(6): 2'O-Methyl Cytosine
  modified_base (7)..(8): 2' Fluoro Guanosine
  modified_base (9)..(9): 2'O-Methyl Adenosine
  modified_base (10)..(11): 2' Fluoro Guanosine
  modified_base (12)..(12): 2'O-Methyl Cytosine
  modified_base (13)..(14): um
  modified_base (15)..(15): 2' Fluoro Guanosine
  modified_base (16)..(16): 2'O-Methyl Adenosine
  modified_base (17)..(18): 2' Fluoro Guanosine
  modified_base (19)..(19): um
  modified_base (20)..(20): 2'O-Methyl Adenosine
  modified_base (21)..(21): 2' Fluoro Guanosine
  modified_base (22)..(23): 2'O-Methyl Cytosine
  modified_base (24)..(24): 2' Fluoro Guanosine
  modified_base (25)..(27): um
  modified_base (28)..(28): gm
  modified_base (29)..(29): um
  modified_base (30)..(30): 2'O-Methyl Cytosine
  modified_base (31)..(31): gm
  modified_base (31)..(31): inverted deoxythymidine incorporated at the 3'  end
  misc_feature (31)..(31): The 2'O-Methyl cytosine is attached through the linker 1,3-propanediolspacer to 2'O-Methyl  cytosine of SEQ ID NO: 279

SEQ ID NO: 379 - RNA, 31 nt, Artificial Sequence; identical to SEQ ID NO: 20
  Aptamer
  modified_base (1)..(1): 2'O-Methyl Cytosine
  modified_base (3)..(3): 2' Fluoro Guanosine
  modified_base (4)..(4): 2'O-Methyl Cytosine
  modified_base (5)..(5): 2' Fluoro Guanosine
  modified_base (6)..(6): 2'O-Methyl Cytosine
  modified_base (7)..(8): 2' Fluoro Guanosine
  modified_base (9)..(9): 2'O-Methyl Adenosine
  modified_base (10)..(11): 2' Fluoro Guanosine
  modified_base (12)..(12): 2'O-Methyl Cytosine
  modified_base (13)..(14): um
  modified_base (15)..(15): 2' Fluoro Guanosine
  modified_base (16)..(16): 2'O-Methyl Adenosine
  modified_base (17)..(18): 2' Fluoro Guanosine
  modified_base (19)..(19): um
  modified_base (20)..(20): 2'O-Methyl Adenosine
  modified_base (21)..(21): 2' Fluoro Guanosine
  modified_base (22)..(23): 2'O-Methyl Cytosine
  modified_base (24)..(24): 2' Fluoro Guanosine
  modified_base (25)..(27): um
  modified_base (28)..(28): gm
  modified_base (29)..(29): um
  modified_base (30)..(30): 2'O-Methyl Cytosine
  modified_base (31)..(31): gm
  modified_base (31)..(31): inverted deoxythymidine incorporated at the 3'  end
  misc_feature (31)..(31): The 2'O-Methyl cytosine is attached through the linker 1,3-propanediolspacer to 2'O-Methyl  cytosine of SEQ ID NO: 280

SEQ ID NO: 380 - RNA, 31 nt, Artificial Sequence; identical to SEQ ID NO: 20
  Aptamer
  modified_base (1)..(1): 2'O-Methyl Cytosine
  misc_feature (1)..(1): The 2'O-Methyl cytosine is attached through the linker 1,3-propanediolspacer to 2'O-Methyl  cytosine of SEQ ID NO: 281
  modified_base (3)..(3): 2' Fluoro Guanosine
  modified_base (4)..(4): 2'O-Methyl Cytosine
  modified_base (5)..(5): 2' Fluoro Guanosine
  modified_base (6)..(6): 2'O-Methyl Cytosine
  modified_base (7)..(8): 2' Fluoro Guanosine
  modified_base (9)..(9): 2'O-Methyl Adenosine
  modified_base (10)..(11): 2' Fluoro Guanosine
  modified_base (12)..(12): 2'O-Methyl Cytosine
  modified_base (13)..(14): um
  modified_base (15)..(15): 2' Fluoro Guanosine
  modified_base (16)..(16): 2'O-Methyl Adenosine
  modified_base (17)..(18): 2' Fluoro Guanosine
  modified_base (19)..(19): um
  modified_base (20)..(20): 2'O-Methyl Adenosine
  modified_base (21)..(21): 2' Fluoro Guanosine
  modified_base (22)..(23): 2'O-Methyl Cytosine
  modified_base (24)..(24): 2' Fluoro Guanosine
  modified_base (25)..(27): um
  modified_base (28)..(28): gm
  modified_base (29)..(29): um
  modified_base (30)..(30): 2'O-Methyl Cytosine
  modified_base (31)..(31): gm
  modified_base (31)..(31): inverted deoxythymidine incorporated at the 3'  end

SEQ ID NO: 381 - RNA, 31 nt, Artificial Sequence; identical to SEQ ID NO: 20
  Aptamer
  modified_base (1)..(1): 2'O-Methyl Cytosine
  misc_feature (1)..(1): The 2'O-Methyl cytosine is attached through the linker 1,3-propanediolspacer to 2'O-Methyl  cytosine of SEQ ID NO: 282
  modified_base (3)..(3): 2' Fluoro Guanosine
  modified_base (4)..(4): 2'O-Methyl Cytosine
  modified_base (5)..(5): 2' Fluoro Guanosine
  modified_base (6)..(6): 2'O-Methyl Cytosine
  modified_base (7)..(8): 2' Fluoro Guanosine
  modified_base (9)..(9): 2'O-Methyl Adenosine
  modified_base (10)..(11): 2' Fluoro Guanosine
  modified_base (12)..(12): 2'O-Methyl Cytosine
  modified_base (13)..(14): um
  modified_base (15)..(15): 2' Fluoro Guanosine
  modified_base (16)..(16): 2'O-Methyl Adenosine
  modified_base (17)..(18): 2' Fluoro Guanosine
  modified_base (19)..(19): um
  modified_base (20)..(20): 2'O-Methyl Adenosine
  modified_base (21)..(21): 2' Fluoro Guanosine
  modified_base (22)..(23): 2'O-Methyl Cytosine
  modified_base (24)..(24): 2' Fluoro Guanosine
  modified_base (25)..(27): um
  modified_base (28)..(28): gm
  modified_base (29)..(29): um
  modified_base (30)..(30): 2'O-Methyl Cytosine
  modified_base (31)..(31): gm
  modified_base (31)..(31): inverted deoxythymidine incorporated at the 3'  end

SEQ ID NO: 382 - RNA, 31 nt, Artificial Sequence; identical to SEQ ID NO: 20
  Aptamer
  modified_base (1)..(1): 2'O-Methyl Cytosine
  misc_feature (1)..(1): The 2'O-Methyl cytosine  is attached through the linker 1,3-propanediolspacer to 2'O-Methyl  cytosine  of SEQ ID NO:283
  modified_base (3)..(3): 2' Fluoro Guanosine
  modified_base (4)..(4): 2'O-Methyl Cytosine
  modified_base (5)..(5): 2' Fluoro Guanosine
  modified_base (6)..(6): 2'O-Methyl Cytosine
  modified_base (7)..(8): 2' Fluoro Guanosine
  modified_base (9)..(9): 2'O-Methyl Adenosine
  modified_base (10)..(11): 2' Fluoro Guanosine
  modified_base (12)..(12): 2'O-Methyl Cytosine
  modified_base (13)..(14): um
  modified_base (15)..(15): 2' Fluoro Guanosine
  modified_base (16)..(16): 2'O-Methyl Adenosine
  modified_base (17)..(18): 2' Fluoro Guanosine
  modified_base (19)..(19): um
  modified_base (20)..(20): 2'O-Methyl Adenosine
  modified_base (21)..(21): 2' Fluoro Guanosine
  modified_base (22)..(23): 2'O-Methyl Cytosine
  modified_base (24)..(24): 2' Fluoro Guanosine
  modified_base (25)..(27): um
  modified_base (28)..(28): gm
  modified_base (29)..(29): um
  modified_base (30)..(30): 2'O-Methyl Cytosine
  modified_base (31)..(31): inverted deoxythymidine incorporated at the 3'  end
  modified_base (31)..(31): gm

SEQ ID NO: 383 - RNA, 33 nt, Artificial Sequence; identical to SEQ ID NO: 193
  aptamer
  modified_base (1)..(1): gm
  misc_feature (1)..(1): The 2'O-Methyl guanosine is attached through the linker 1,3-propanediolspacer to 2'O-Methyl  cytosine  of SEQ ID NO: 285
  modified_base (2)..(2): 2'O-Methyl Cytosine
  modified_base (3)..(3): gm
  modified_base (4)..(4): 2'O-Methyl Cytosine
  modified_base (5)..(6): gm
  modified_base (7)..(7): um
  modified_base (8)..(10): 2' Fluoro Guanosine
  modified_base (11)..(13): 2'O-Methyl Adenosine
  modified_base (14)..(14): um
  modified_base (15)..(15): 2' Fluoro Guanosine
  modified_base (16)..(16): um
  modified_base (17)..(17): 2' Fluoro Guanosine
  modified_base (18)..(18): 2'O-Methyl Adenosine
  modified_base (19)..(19): 2' Fluoro Guanosine
  modified_base (20)..(20): 2'O-Methyl Adenosine
  modified_base (21)..(21): um
  modified_base (22)..(24): 2' Fluoro Guanosine
  modified_base (25)..(26): um
  modified_base (27)..(27): gm
  modified_base (28)..(29): 2'O-Methyl Cytosine
  modified_base (30)..(30): gm
  modified_base (31)..(31): 2'O-Methyl Cytosine
  modified_base (32)..(32): gm
  modified_base (33)..(33): inverted deoxythymidine incorporated at the 3'  end
  modified_base (33)..(33): 2'O-Methyl Cytosine

SEQ ID NO: 384 - RNA, 33 nt, Artificial Sequence; identical to SEQ ID NO: 193
  aptamer
  modified_base (1)..(1): gm
  misc_feature (1)..(1): The 2'O-Methyl guanosine is attached through the linker 1,3-propanediolspacer to 2'O-Methyl  cytosine  of SEQ ID NO: 286
  modified_base (2)..(2): 2'O-Methyl Cytosine
  modified_base (3)..(3): gm
  modified_base (4)..(4): 2'O-Methyl Cytosine
  modified_base (5)..(6): gm
  modified_base (7)..(7): um
  modified_base (8)..(10): 2' Fluoro Guanosine
  modified_base (11)..(13): 2'O-Methyl Adenosine
  modified_base (14)..(14): um
  modified_base (15)..(15): 2' Fluoro Guanosine
  modified_base (16)..(16): um
  modified_base (17)..(17): 2' Fluoro Guanosine
  modified_base (18)..(18): 2'O-Methyl Adenosine
  modified_base (19)..(19): 2' Fluoro Guanosine
  modified_base (20)..(20): 2'O-Methyl Adenosine
  modified_base (21)..(21): um
  modified_base (22)..(24): 2' Fluoro Guanosine
  modified_base (25)..(26): um
  modified_base (27)..(27): gm
  modified_base (28)..(29): 2'O-Methyl Cytosine
  modified_base (30)..(30): gm
  modified_base (31)..(31): 2'O-Methyl Cytosine
  modified_base (32)..(32): gm
  modified_base (33)..(33): 2'O-Methyl Cytosine
  modified_base (33)..(33): inverted deoxythymidine incorporated at the 3'  end

SEQ ID NO: 385 - RNA, 33 nt, Artificial Sequence; identical to SEQ ID NO: 152
  Aptamer
  modified_base (1)..(2): 2'O-Methyl Cytosine
  misc_feature (1)..(1): The 2'O-Methyl cytosine is attached through the linker 1,3-propanediolspacer to 2'O-Methyl cytosine of SEQ ID NO: 289
  modified_base (3)..(3): 2' Fluoro Guanosine
  modified_base (4)..(4): 2'O-Methyl Cytosine
  modified_base (5)..(5): 2' Fluoro Guanosine
  modified_base (6)..(6): 2'O-Methyl Cytosine
  modified_base (7)..(8): 2' Fluoro Guanosine
  modified_base (9)..(9): 2'O-Methyl Adenosine
  modified_base (10)..(11): 2' Fluoro Guanosine
  modified_base (12)..(12): 2'O-Methyl Cytosine
  modified_base (13)..(14): um
  modified_base (15)..(15): 2' Fluoro Guanosine
  modified_base (16)..(16): 2'O-Methyl Adenosine
  modified_base (17)..(18): 2' Fluoro Guanosine
  modified_base (19)..(19): um
  modified_base (20)..(20): 2'O-Methyl Adenosine
  modified_base (21)..(21): 2' Fluoro Guanosine
  modified_base (22)..(23): 2'O-Methyl Cytosine
  modified_base (24)..(24): 2' Fluoro Guanosine
  modified_base (25)..(27): um
  modified_base (28)..(28): gm
  modified_base (29)..(29): um
  modified_base (30)..(30): 2'O-Methyl Cytosine
  modified_base (31)..(32): gm
  modified_base (33)..(33): 2'O-Methyl Cytosine
  modified_base (33)..(33): inverted deoxythymidine incorporated at the 3'  end

SEQ ID NO: 386 - RNA, 33 nt, Artificial Sequence; identical to SEQ ID NO: 152
  Aptamer
  modified_base (1)..(2): 2'O-Methyl Cytosine
  misc_feature (1)..(1): The 2'O-Methyl cytosine is attached through the linker 1,3-propanediolspacer to 2'O-Methyl cytosine of SEQ ID NO: 290
  modified_base (3)..(3): 2' Fluoro Guanosine
  modified_base (4)..(4): 2'O-Methyl Cytosine
  modified_base (5)..(5): 2' Fluoro Guanosine
  modified_base (6)..(6): 2'O-Methyl Cytosine
  modified_base (7)..(8): 2' Fluoro Guanosine
  modified_base (9)..(9): 2'O-Methyl Adenosine
  modified_base (10)..(11): 2' Fluoro Guanosine
  modified_base (12)..(12): 2'O-Methyl Cytosine
  modified_base (13)..(14): um
  modified_base (15)..(15): 2' Fluoro Guanosine
  modified_base (16)..(16): 2'O-Methyl Adenosine
  modified_base (17)..(18): 2' Fluoro Guanosine
  modified_base (19)..(19): um
  modified_base (20)..(20): 2'O-Methyl Adenosine
  modified_base (21)..(21): 2' Fluoro Guanosine
  modified_base (22)..(23): 2'O-Methyl Cytosine
  modified_base (24)..(24): 2' Fluoro Guanosine
  modified_base (25)..(27): um
  modified_base (28)..(28): gm
  modified_base (29)..(29): um
  modified_base (30)..(30): 2'O-Methyl Cytosine
  modified_base (31)..(32): gm
  modified_base (33)..(33): 2'O-Methyl Cytosine
  modified_base (33)..(33): inverted deoxythymidine incorporated at the 3'  end

SEQ ID NO: 387 - RNA, 33 nt, Artificial Sequence; identical to SEQ ID NO: 152
  Aptamer
  modified_base (1)..(2): 2'O-Methyl Cytosine
  misc_feature (1)..(1): The 2'O-Methyl cytosine is attached through the linker 1,3-propanediolspacer to 2'O-Methyl cytosine of SEQ ID NO: 291
  modified_base (3)..(3): 2' Fluoro Guanosine
  modified_base (4)..(4): 2'O-Methyl Cytosine
  modified_base (5)..(5): 2' Fluoro Guanosine
  modified_base (6)..(6): 2'O-Methyl Cytosine
  modified_base (7)..(8): 2' Fluoro Guanosine
  modified_base (9)..(9): 2'O-Methyl Adenosine
  modified_base (10)..(11): 2' Fluoro Guanosine
  modified_base (12)..(12): 2'O-Methyl Cytosine
  modified_base (13)..(14): um
  modified_base (15)..(15): 2' Fluoro Guanosine
  modified_base (16)..(16): 2'O-Methyl Adenosine
  modified_base (17)..(18): 2' Fluoro Guanosine
  modified_base (19)..(19): um
  modified_base (20)..(20): 2'O-Methyl Adenosine
  modified_base (21)..(21): 2' Fluoro Guanosine
  modified_base (22)..(23): 2'O-Methyl Cytosine
  modified_base (24)..(24): 2' Fluoro Guanosine
  modified_base (25)..(27): um
  modified_base (28)..(28): gm
  modified_base (29)..(29): um
  modified_base (30)..(30): 2'O-Methyl Cytosine
  modified_base (31)..(32): gm
  modified_base (33)..(33): 2'O-Methyl Cytosine
  modified_base (33)..(33): inverted deoxythymidine incorporated at the 3'  end

SEQ ID NO: 388 - RNA, 33 nt, Artificial Sequence; identical to SEQ ID NO: 152
  Aptamer
  modified_base (1)..(2): 2'O-Methyl Cytosine
  misc_feature (1)..(1): The 2'O-Methyl cytosine is attached through the linker 1,3-propanediolspacer to 2'O-Methyl cytosine of SEQ ID NO: 292
  misc_feature (1)..(1): The 2'O-Methyl cytosine is attached through the linker 1,3-propanediolspacer to 2'O-Methyl cytosine of SEQ ID NO: 292
  modified_base (3)..(3): 2' Fluoro Guanosine
  modified_base (4)..(4): 2'O-Methyl Cytosine
  modified_base (5)..(5): 2' Fluoro Guanosine
  modified_base (6)..(6): 2'O-Methyl Cytosine
  modified_base (7)..(8): 2' Fluoro Guanosine
  modified_base (9)..(9): 2'O-Methyl Adenosine
  modified_base (10)..(11): 2' Fluoro Guanosine
  modified_base (12)..(12): 2'O-Methyl Cytosine
  modified_base (13)..(14): um
  modified_base (15)..(15): 2' Fluoro Guanosine
  modified_base (16)..(16): 2'O-Methyl Adenosine
  modified_base (17)..(18): 2' Fluoro Guanosine
  modified_base (19)..(19): um
  modified_base (20)..(20): 2'O-Methyl Adenosine
  modified_base (21)..(21): 2' Fluoro Guanosine
  modified_base (22)..(23): 2'O-Methyl Cytosine
  modified_base (24)..(24): 2' Fluoro Guanosine
  modified_base (25)..(27): um
  modified_base (28)..(28): gm
  modified_base (29)..(29): um
  modified_base (30)..(30): 2'O-Methyl Cytosine
  modified_base (31)..(32): gm
  modified_base (33)..(33): inverted deoxythymidine incorporated at the 3'  end
  modified_base (33)..(33): 2'O-Methyl Cytosine

SEQ ID NO: 389 - RNA, 33 nt, Artificial Sequence; identical to SEQ ID NO: 152
  Aptamer
  modified_base (1)..(2): 2'O-Methyl Cytosine
  misc_feature (1)..(1): The 2'O-Methyl cytosine is attached through the linker 1,3-propanediolspacer to 2'O-Methyl cytosine of SEQ ID NO: 293
  modified_base (3)..(3): 2' Fluoro Guanosine
  modified_base (4)..(4): 2'O-Methyl Cytosine
  modified_base (5)..(5): 2' Fluoro Guanosine
  modified_base (6)..(6): 2'O-Methyl Cytosine
  modified_base (7)..(8): 2' Fluoro Guanosine
  modified_base (9)..(9): 2'O-Methyl Adenosine
  modified_base (10)..(11): 2' Fluoro Guanosine
  modified_base (12)..(12): 2'O-Methyl Cytosine
  modified_base (13)..(14): um
  modified_base (15)..(15): 2' Fluoro Guanosine
  modified_base (16)..(16): 2'O-Methyl Adenosine
  modified_base (17)..(18): 2' Fluoro Guanosine
  modified_base (19)..(19): um
  modified_base (20)..(20): 2'O-Methyl Adenosine
  modified_base (21)..(21): 2' Fluoro Guanosine
  modified_base (22)..(23): 2'O-Methyl Cytosine
  modified_base (24)..(24): 2' Fluoro Guanosine
  modified_base (25)..(27): um
  modified_base (28)..(28): gm
  modified_base (29)..(29): um
  modified_base (30)..(30): 2'O-Methyl Cytosine
  modified_base (31)..(32): gm
  modified_base (33)..(33): 2'O-Methyl Cytosine
  modified_base (33)..(33): inverted deoxythymidine incorporated at the 3'  end

SEQ ID NO: 390 - skipped

SEQ ID NO: 391 - RNA, 34 nt, Artificial Sequence; identical to SEQ ID NO: 48
  aptamer
  modified_base (1)..(2): gm
  misc_feature (1)..(1): The 2'O-Methyl guanosine is attached  through the linker 1,3-propanediolspacer to 2'O-Methyl guanosine of SEQ ID NO: 58
  modified_base (3)..(3): 2'O-Methyl Cytosine
  modified_base (4)..(4): gm
  modified_base (5)..(5): 2'O-Methyl Adenosine
  modified_base (6)..(6): 2'O-Methyl Cytosine
  modified_base (7)..(8): gm
  modified_base (10)..(10): 2'O-Methyl Adenosine
  modified_base (11)..(11): gm
  modified_base (12)..(12): 2'O-Methyl Adenosine
  modified_base (15)..(15): 2'O-Methyl Adenosine
  modified_base (17)..(19): 2' Fluoro Guanosine
  modified_base (20)..(20): 2'O-Methyl Cytosine
  modified_base (21)..(21): 2'O-Methyl Adenosine
  modified_base (22)..(22): 2' Fluoro Guanosine
  modified_base (24)..(24): 2' Fluoro Guanosine
  modified_base (26)..(26): 2' Fluoro Guanosine
  modified_base (27)..(27): 2'O-Methyl Adenosine
  modified_base (28)..(29): 2'O-Methyl Cytosine
  modified_base (30)..(30): gm
  modified_base (31)..(31): 2'O-Methyl Cytosine
  modified_base (32)..(32): gm
  modified_base (33)..(34): 2'O-Methyl Cytosine
  modified_base (34)..(34): inverted deoxythymidine incorporated at the 3'  end

SEQ ID NO: 392 - RNA, 34 nt, Artificial Sequence; identical to SEQ ID NO: 48
  aptamer
  modified_base (1)..(2): gm
  misc_feature (1)..(1): The 2'O-Methyl guanosine is attached through the linker Hexaethylene glycol spacer to 2'O-Methyl guanosine of SEQ ID NO:59
  modified_base (3)..(3): 2'O-Methyl Cytosine
  modified_base (4)..(4): gm
  modified_base (5)..(5): 2'O-Methyl Adenosine
  modified_base (6)..(6): 2'O-Methyl Cytosine
  modified_base (7)..(8): gm
  modified_base (9)..(9): um
  modified_base (10)..(10): 2'O-Methyl Adenosine
  modified_base (11)..(11): gm
  modified_base (12)..(12): 2'O-Methyl Adenosine
  modified_base (13)..(14): um
  modified_base (15)..(15): 2'O-Methyl Adenosine
  modified_base (16)..(16): um
  modified_base (17)..(19): 2' Fluoro Guanosine
  modified_base (20)..(20): 2'O-Methyl Cytosine
  modified_base (21)..(21): 2'O-Methyl Adenosine
  modified_base (22)..(22): 2' Fluoro Guanosine
  modified_base (23)..(23): um
  modified_base (24)..(24): 2' Fluoro Guanosine
  modified_base (25)..(25): um
  modified_base (26)..(26): 2' Fluoro Guanosine
  modified_base (27)..(27): 2'O-Methyl Adenosine
  modified_base (28)..(29): 2'O-Methyl Cytosine
  modified_base (30)..(30): gm
  modified_base (31)..(31): 2'O-Methyl Cytosine
  modified_base (32)..(32): gm
  modified_base (33)..(34): 2'O-Methyl Cytosine
  modified_base (34)..(34): inverted deoxythymidine incorporated at the 3'  end

SEQ ID NO: 393 - RNA, 33 nt, Artificial Sequence; identical to SEQ ID NO: 1
  Aptamer
  modified_base (1)..(2): 2'O-Methyl Cytosine
  misc_feature (1)..(1): The 2'O-Methyl cytosine is attached  through the linker 1,3-propanediolspacer to 2'O-Methyl cytosine of another nucleotide sequence CXAC
  modified_base (3)..(3): 2' Fluoro Guanosine
  modified_base (4)..(4): 2'O-Methyl Cytosine
  modified_base (5)..(5): 2' Fluoro Guanosine
  modified_base (6)..(6): 2'O-Methyl Cytosine
  modified_base (7)..(8): 2' Fluoro Guanosine
  modified_base (9)..(9): 2'O-Methyl Adenosine
  modified_base (10)..(12): 2' Fluoro Guanosine
  modified_base (13)..(13): gm
  modified_base (14)..(16): um
  modified_base (17)..(17): 2'O-Methyl Cytosine
  modified_base (18)..(18): 2'O-Methyl Adenosine
  modified_base (19)..(19): um
  modified_base (20)..(21): 2'O-Methyl Adenosine
  modified_base (22)..(22): um
  modified_base (23)..(25): 2'O-Methyl Cytosine
  modified_base (26)..(26): 2' Fluoro Guanosine
  modified_base (27)..(29): um
  modified_base (30)..(30): gm
  modified_base (31)..(31): um
  modified_base (32)..(32): 2'O-Methyl Cytosine
  modified_base (33)..(33): inverted deoxythymidine incorporated at the 3'  end
  modified_base (33)..(33): gm

SEQ ID NO: 394 - RNA, 33 nt, Artificial Sequence; identical to SEQ ID NO: 1
  Aptamer
  modified_base (1)..(2): 2'O-Methyl Cytosine
  misc_feature (1)..(1): The 2'O-Methyl cytosine is attached  through the linker 1,3-propanediolspacer to 2'O-Methyl cytosine of another nucleotide sequence CXAC
  modified_base (3)..(3): 2' Fluoro Guanosine
  modified_base (4)..(4): 2'O-Methyl Cytosine
  modified_base (5)..(5): 2' Fluoro Guanosine
  modified_base (6)..(6): 2'O-Methyl Cytosine
  modified_base (7)..(8): 2' Fluoro Guanosine
  modified_base (9)..(9): 2'O-Methyl Adenosine
  modified_base (10)..(12): 2' Fluoro Guanosine
  modified_base (13)..(13): gm
  modified_base (14)..(16): um
  modified_base (17)..(17): 2'O-Methyl Cytosine
  modified_base (18)..(18): 2'O-Methyl Adenosine
  modified_base (19)..(19): um
  modified_base (20)..(21): 2'O-Methyl Adenosine
  modified_base (22)..(22): um
  modified_base (23)..(25): 2'O-Methyl Cytosine
  modified_base (26)..(26): 2' Fluoro Guanosine
  modified_base (27)..(29): um
  modified_base (30)..(30): gm
  modified_base (31)..(31): um
  modified_base (32)..(32): 2'O-Methyl Cytosine
  modified_base (33)..(33): gm
  modified_base (33)..(33): inverted deoxythymidine incorporated at the 3'  end

SEQ ID NO: 395 - RNA, 33 nt, Artificial Sequence; identical to SEQ ID NO: 1
  Aptamer
  modified_base (1)..(2): 2'O-Methyl Cytosine
  misc_feature (1)..(1): The 2'O-Methyl cytosine is attached  through the linker 1,3-propanediolspacer to 2'O-Methyl cytosine of another nucleotide sequence CXAC
  modified_base (3)..(3): 2' Fluoro Guanosine
  modified_base (4)..(4): 2'O-Methyl Cytosine
  modified_base (5)..(5): 2' Fluoro Guanosine
  modified_base (6)..(6): 2'O-Methyl Cytosine
  modified_base (7)..(8): 2' Fluoro Guanosine
  modified_base (9)..(9): 2'O-Methyl Adenosine
  modified_base (10)..(12): 2' Fluoro Guanosine
  modified_base (13)..(13): gm
  modified_base (14)..(16): um
  modified_base (17)..(17): 2'O-Methyl Cytosine
  modified_base (18)..(18): 2'O-Methyl Adenosine
  modified_base (19)..(19): um
  modified_base (20)..(21): 2'O-Methyl Adenosine
  modified_base (22)..(22): um
  modified_base (23)..(25): 2'O-Methyl Cytosine
  modified_base (26)..(26): 2' Fluoro Guanosine
  modified_base (27)..(29): um
  modified_base (30)..(30): gm
  modified_base (31)..(31): um
  modified_base (32)..(32): 2'O-Methyl Cytosine
  modified_base (33)..(33): gm
  modified_base (33)..(33): inverted deoxythymidine incorporated at the 3'  end

SEQ ID NO: 396 - RNA, 33 nt, Artificial Sequence; identical to SEQ ID NO: 1
  Aptamer
  modified_base (1)..(2): 2'O-Methyl Cytosine
  misc_feature (1)..(1): The 2'O-Methyl cytosine is attached  through the linker 1,3-propanediolspacer to 2'O-Methyl cytosine of SEQ ID NO: 65
  modified_base (3)..(3): 2' Fluoro Guanosine
  modified_base (4)..(4): 2'O-Methyl Cytosine
  modified_base (5)..(5): 2' Fluoro Guanosine
  modified_base (6)..(6): 2'O-Methyl Cytosine
  modified_base (7)..(8): 2' Fluoro Guanosine
  modified_base (9)..(9): 2'O-Methyl Adenosine
  modified_base (10)..(12): 2' Fluoro Guanosine
  modified_base (13)..(13): gm
  modified_base (14)..(16): um
  modified_base (17)..(17): 2'O-Methyl Cytosine
  modified_base (18)..(18): 2'O-Methyl Adenosine
  modified_base (19)..(19): um
  modified_base (20)..(21): 2'O-Methyl Adenosine
  modified_base (22)..(22): um
  modified_base (23)..(25): 2'O-Methyl Cytosine
  modified_base (26)..(26): 2' Fluoro Guanosine
  modified_base (27)..(29): um
  modified_base (30)..(30): gm
  modified_base (31)..(31): um
  modified_base (32)..(32): 2'O-Methyl Cytosine
  modified_base (33)..(33): inverted deoxythymidine incorporated at the 3'  end
  modified_base (33)..(33): gm

SEQ ID NO: 397 - RNA, 33 nt, Artificial Sequence; identical to SEQ ID NO: 1
  Aptamer
  modified_base (1)..(2): 2'O-Methyl Cytosine
  misc_feature (1)..(1): The 2'O-Methyl cytosine is attached  through the linker 1,3-propanediolspacer to 2'O-Methyl cytosine of another nucleotide sequence CXAC
  modified_base (3)..(3): 2' Fluoro Guanosine
  modified_base (4)..(4): 2'O-Methyl Cytosine
  modified_base (5)..(5): 2' Fluoro Guanosine
  modified_base (6)..(6): 2'O-Methyl Cytosine
  modified_base (7)..(8): 2' Fluoro Guanosine
  modified_base (9)..(9): 2'O-Methyl Adenosine
  modified_base (10)..(12): 2' Fluoro Guanosine
  modified_base (13)..(13): gm
  modified_base (14)..(16): um
  modified_base (17)..(17): 2'O-Methyl Cytosine
  modified_base (18)..(18): 2'O-Methyl Adenosine
  modified_base (19)..(19): um
  modified_base (20)..(21): 2'O-Methyl Adenosine
  modified_base (22)..(22): um
  modified_base (23)..(25): 2'O-Methyl Cytosine
  modified_base (26)..(26): 2' Fluoro Guanosine
  modified_base (27)..(29): um
  modified_base (30)..(30): gm
  modified_base (31)..(31): um
  modified_base (32)..(32): 2'O-Methyl Cytosine
  modified_base (33)..(33): gm
  modified_base (33)..(33): inverted deoxythymidine incorporated at the 3'  end

SEQ ID NO: 398 - RNA, 34 nt, Artificial Sequence; identical to SEQ ID NO: 48
  aptamer
  modified_base (1)..(2): gm
  misc_feature (1)..(1): The 2'O-Methyl guanosine is attached through the linker 1,3-propanediolspacer to 2'O-Methyl cytosine of SEQ ID NO: 69
  modified_base (3)..(3): 2'O-Methyl Cytosine
  modified_base (4)..(4): gm
  modified_base (5)..(5): 2'O-Methyl Adenosine
  modified_base (6)..(6): 2'O-Methyl Cytosine
  modified_base (7)..(8): gm
  modified_base (9)..(9): um
  modified_base (10)..(10): 2'O-Methyl Adenosine
  modified_base (11)..(11): gm
  modified_base (12)..(12): 2'O-Methyl Adenosine
  modified_base (13)..(14): um
  modified_base (15)..(15): 2'O-Methyl Adenosine
  modified_base (16)..(16): um
  modified_base (17)..(19): 2' Fluoro Guanosine
  modified_base (20)..(20): 2'O-Methyl Cytosine
  modified_base (21)..(21): 2'O-Methyl Adenosine
  modified_base (22)..(22): 2' Fluoro Guanosine
  modified_base (23)..(23): um
  modified_base (24)..(24): 2' Fluoro Guanosine
  modified_base (25)..(25): um
  modified_base (26)..(26): 2' Fluoro Guanosine
  modified_base (27)..(27): 2'O-Methyl Adenosine
  modified_base (28)..(29): 2'O-Methyl Cytosine
  modified_base (30)..(30): gm
  modified_base (31)..(31): 2'O-Methyl Cytosine
  modified_base (32)..(32): gm
  modified_base (33)..(34): 2'O-Methyl Cytosine
  modified_base (34)..(34): inverted deoxythymidine incorporated at the 3'  end

SEQ ID NO: 399 - RNA, 34 nt, Artificial Sequence; identical to SEQ ID NO: 48
  aptamer
  modified_base (1)..(2): gm
  misc_feature (1)..(1): The 2'O-Methyl guanosine is attached through the linker hexaethylene glycol spacer to 2'O-Methyl cytosine of SEQ ID NO: 70
  modified_base (3)..(3): 2'O-Methyl Cytosine
  modified_base (4)..(4): gm
  modified_base (5)..(5): 2'O-Methyl Adenosine
  modified_base (6)..(6): 2'O-Methyl Cytosine
  modified_base (7)..(8): gm
  modified_base (9)..(9): um
  modified_base (10)..(10): 2'O-Methyl Adenosine
  modified_base (11)..(11): gm
  modified_base (12)..(12): 2'O-Methyl Adenosine
  modified_base (13)..(14): um
  modified_base (15)..(15): 2'O-Methyl Adenosine
  modified_base (16)..(16): um
  modified_base (17)..(19): 2' Fluoro Guanosine
  modified_base (20)..(20): 2'O-Methyl Cytosine
  modified_base (21)..(21): 2'O-Methyl Adenosine
  modified_base (22)..(22): 2' Fluoro Guanosine
  modified_base (23)..(23): um
  modified_base (24)..(24): 2' Fluoro Guanosine
  modified_base (25)..(25): um
  modified_base (26)..(26): 2' Fluoro Guanosine
  modified_base (27)..(27): 2'O-Methyl Adenosine
  modified_base (28)..(29): 2'O-Methyl Cytosine
  modified_base (30)..(30): gm
  modified_base (31)..(31): 2'O-Methyl Cytosine
  modified_base (32)..(32): gm
  modified_base (33)..(34): 2'O-Methyl Cytosine
  modified_base (34)..(34): inverted deoxythymidine incorporated at the 3'  end

SEQ ID NO: 400 - RNA, 35 nt, Artificial Sequence; identical to SEQ ID NO: 67
  aptamer
  modified_base (1)..(2): 2'O-Methyl Cytosine
  misc_feature (1)..(1): The 2'O-Methyl cytosine is attached through the linker 1,3-propanediolspacer to 2'O-Methyl cytosine of SEQ ID NO: 73
  modified_base (3)..(3): 2' Fluoro Guanosine
  modified_base (4)..(4): 2'O-Methyl Cytosine
  modified_base (5)..(5): 2' Fluoro Guanosine
  modified_base (6)..(6): 2'O-Methyl Cytosine
  modified_base (7)..(8): 2' Fluoro Guanosine
  modified_base (9)..(9): 2'O-Methyl Adenosine
  modified_base (10)..(12): 2' Fluoro Guanosine
  modified_base (13)..(13): gm
  modified_base (14)..(16): um
  modified_base (17)..(17): 2'O-Methyl Cytosine
  modified_base (18)..(18): 2'O-Methyl Adenosine
  modified_base (19)..(19): um
  modified_base (20)..(21): 2'O-Methyl Adenosine
  modified_base (22)..(22): um
  modified_base (23)..(25): 2'O-Methyl Cytosine
  modified_base (26)..(26): 2' Fluoro Guanosine
  modified_base (27)..(29): um
  modified_base (30)..(30): gm
  modified_base (31)..(31): um
  modified_base (32)..(32): 2'O-Methyl Cytosine
  modified_base (33)..(34): gm
  modified_base (35)..(35): 2'O-Methyl Cytosine
  modified_base (35)..(35): inverted deoxythymidine incorporated at the 3'  end

SEQ ID NO: 401 - RNA, 35 nt, Artificial Sequence; identical to SEQ ID NO: 67
  aptamer
  modified_base (1)..(2): 2'O-Methyl Cytosine
  misc_feature (1)..(1): The 2'O-Methyl cytosine is attached through the linker 1,3-propanediolspacer to 2'O-Methyl cytosine of SEQ ID NO: 74
  modified_base (3)..(3): 2' Fluoro Guanosine
  modified_base (4)..(4): 2'O-Methyl Cytosine
  modified_base (5)..(5): 2' Fluoro Guanosine
  modified_base (6)..(6): 2'O-Methyl Cytosine
  modified_base (7)..(8): 2' Fluoro Guanosine
  modified_base (9)..(9): 2'O-Methyl Adenosine
  modified_base (10)..(12): 2' Fluoro Guanosine
  modified_base (13)..(13): gm
  modified_base (14)..(16): um
  modified_base (17)..(17): 2'O-Methyl Cytosine
  modified_base (18)..(18): 2'O-Methyl Adenosine
  modified_base (19)..(19): um
  modified_base (20)..(21): 2'O-Methyl Adenosine
  modified_base (22)..(22): um
  modified_base (23)..(25): 2'O-Methyl Cytosine
  modified_base (26)..(26): 2' Fluoro Guanosine
  modified_base (27)..(29): um
  modified_base (30)..(30): gm
  modified_base (31)..(31): um
  modified_base (32)..(32): 2'O-Methyl Cytosine
  modified_base (33)..(34): gm
  modified_base (35)..(35): 2'O-Methyl Cytosine
  modified_base (35)..(35): inverted deoxythymidine incorporated at the 3'  end

SEQ ID NO: 402 - RNA, 35 nt, Artificial Sequence; identical to SEQ ID NO: 67
  aptamer
  modified_base (1)..(2): 2'O-Methyl Cytosine
  misc_feature (1)..(1): The 2'O-Methyl cytosine is attached through the linker 1,3-propanediolspacer to 2'O-Methyl cytosine of SEQ ID NO: 75
  modified_base (3)..(3): 2' Fluoro Guanosine
  modified_base (4)..(4): 2'O-Methyl Cytosine
  modified_base (5)..(5): 2' Fluoro Guanosine
  modified_base (6)..(6): 2'O-Methyl Cytosine
  modified_base (7)..(8): 2' Fluoro Guanosine
  modified_base (9)..(9): 2'O-Methyl Adenosine
  modified_base (10)..(12): 2' Fluoro Guanosine
  modified_base (13)..(13): gm
  modified_base (14)..(16): um
  modified_base (17)..(17): 2'O-Methyl Cytosine
  modified_base (18)..(18): 2'O-Methyl Adenosine
  modified_base (19)..(19): um
  modified_base (20)..(21): 2'O-Methyl Adenosine
  modified_base (22)..(22): um
  modified_base (23)..(25): 2'O-Methyl Cytosine
  modified_base (26)..(26): 2' Fluoro Guanosine
  modified_base (27)..(29): um
  modified_base (30)..(30): gm
  modified_base (31)..(31): um
  modified_base (32)..(32): 2'O-Methyl Cytosine
  modified_base (33)..(34): gm
  modified_base (35)..(35): 2'O-Methyl Cytosine
  modified_base (35)..(35): inverted deoxythymidine incorporated at the 3'  end

SEQ ID NO: 403 - RNA, 35 nt, Artificial Sequence; identical to SEQ ID NO: 67
  aptamer
  modified_base (1)..(2): 2'O-Methyl Cytosine
  misc_feature (1)..(1): The 2'O-Methyl cytosine is attached through the linker 1,3-propanediolspacer to 2'O-Methyl cytosine of SEQ ID NO: 76
  modified_base (3)..(3): 2' Fluoro Guanosine
  modified_base (4)..(4): 2'O-Methyl Cytosine
  modified_base (5)..(5): 2' Fluoro Guanosine
  modified_base (6)..(6): 2'O-Methyl Cytosine
  modified_base (7)..(8): 2' Fluoro Guanosine
  modified_base (9)..(9): 2'O-Methyl Adenosine
  modified_base (10)..(12): 2' Fluoro Guanosine
  modified_base (13)..(13): gm
  modified_base (14)..(16): um
  modified_base (17)..(17): 2'O-Methyl Cytosine
  modified_base (18)..(18): 2'O-Methyl Adenosine
  modified_base (19)..(19): um
  modified_base (20)..(21): 2'O-Methyl Adenosine
  modified_base (22)..(22): um
  modified_base (23)..(25): 2'O-Methyl Cytosine
  modified_base (26)..(26): 2' Fluoro Guanosine
  modified_base (27)..(29): um
  modified_base (30)..(30): gm
  modified_base (31)..(31): um
  modified_base (32)..(32): 2'O-Methyl Cytosine
  modified_base (33)..(34): gm
  modified_base (35)..(35): 2'O-Methyl Cytosine
  modified_base (35)..(35): inverted deoxythymidine incorporated at the 3'  end

SEQ ID NO: 404 - RNA, 35 nt, Artificial Sequence; identical to SEQ ID NO: 67
  aptamer
  modified_base (1)..(2): 2'O-Methyl Cytosine
  misc_feature (1)..(1): The 2'O-Methyl cytosine is attached through the linker 1,3-propanediolspacer to 2'O-Methyl cytosine of SEQ ID NO: 77
  modified_base (3)..(3): 2' Fluoro Guanosine
  modified_base (4)..(4): 2'O-Methyl Cytosine
  modified_base (5)..(5): 2' Fluoro Guanosine
  modified_base (6)..(6): 2'O-Methyl Cytosine
  modified_base (7)..(8): 2' Fluoro Guanosine
  modified_base (9)..(9): 2'O-Methyl Adenosine
  modified_base (10)..(12): 2' Fluoro Guanosine
  modified_base (13)..(13): gm
  modified_base (14)..(16): um
  modified_base (17)..(17): 2'O-Methyl Cytosine
  modified_base (18)..(18): 2'O-Methyl Adenosine
  modified_base (19)..(19): um
  modified_base (20)..(21): 2'O-Methyl Adenosine
  modified_base (22)..(22): um
  modified_base (23)..(25): 2'O-Methyl Cytosine
  modified_base (26)..(26): 2' Fluoro Guanosine
  modified_base (27)..(29): um
  modified_base (30)..(30): gm
  modified_base (31)..(31): um
  modified_base (32)..(32): 2'O-Methyl Cytosine
  modified_base (33)..(34): gm
  modified_base (35)..(35): 2'O-Methyl Cytosine
  modified_base (35)..(35): inverted deoxythymidine incorporated at the 3'  end

SEQ ID NO: 405 - RNA, 38 nt, Artificial Sequence; identical to SEQ ID NO: 78
  Aptamer
  modified_base (1)..(1): gm
  misc_feature (1)..(1): The 2'O-Methyl guanosine is attached through the linker 1,3-propanediolspacer to 2'O-Methyl guanosine of SEQ ID NO: 80
  modified_base (2)..(2): 2'O-Methyl Cytosine
  modified_base (3)..(4): gm
  modified_base (5)..(5): 2'O-Methyl Cytosine
  modified_base (6)..(6): gm
  modified_base (7)..(7): 2'O-Methyl Adenosine
  modified_base (8)..(8): 2'O-Methyl Cytosine
  modified_base (9)..(10): gm
  modified_base (11)..(11): um
  modified_base (12)..(12): 2'O-Methyl Adenosine
  modified_base (13)..(13): gm
  modified_base (14)..(14): 2'O-Methyl Adenosine
  modified_base (15)..(16): um
  modified_base (17)..(17): 2'O-Methyl Adenosine
  modified_base (18)..(18): um
  modified_base (19)..(21): 2' Fluoro Guanosine
  modified_base (22)..(22): 2'O-Methyl Cytosine
  modified_base (23)..(23): 2'O-Methyl Adenosine
  modified_base (24)..(24): 2' Fluoro Guanosine
  modified_base (25)..(25): um
  modified_base (26)..(26): 2' Fluoro Guanosine
  modified_base (27)..(27): um
  modified_base (28)..(28): 2' Fluoro Guanosine
  modified_base (29)..(29): 2'O-Methyl Adenosine
  modified_base (30)..(31): 2'O-Methyl Cytosine
  modified_base (32)..(32): gm
  modified_base (33)..(33): 2'O-Methyl Cytosine
  modified_base (34)..(34): gm
  modified_base (35)..(36): 2'O-Methyl Cytosine
  modified_base (37)..(37): gm
  modified_base (38)..(38): 2'O-Methyl Cytosine
  modified_base (38)..(38): inverted deoxythymidine incorporated at the 3'  end

SEQ ID NO: 406 - RNA, 38 nt, Artificial Sequence; identical to SEQ ID NO: 78
  Aptamer
  modified_base (1)..(1): gm
  misc_feature (1)..(1): The 2'O-Methyl guanosine is attached through the linker hexaethylene glycol spacer to 2'O-Methyl guanosine of SEQ ID NO: 81
  modified_base (2)..(2): 2'O-Methyl Cytosine
  modified_base (3)..(4): gm
  modified_base (5)..(5): 2'O-Methyl Cytosine
  modified_base (6)..(6): gm
  modified_base (7)..(7): 2'O-Methyl Adenosine
  modified_base (8)..(8): 2'O-Methyl Cytosine
  modified_base (9)..(10): gm
  modified_base (11)..(11): um
  modified_base (12)..(12): 2'O-Methyl Adenosine
  modified_base (13)..(13): gm
  modified_base (14)..(14): 2'O-Methyl Adenosine
  modified_base (15)..(16): um
  modified_base (17)..(17): 2'O-Methyl Adenosine
  modified_base (18)..(18): um
  modified_base (19)..(21): 2' Fluoro Guanosine
  modified_base (22)..(22): 2'O-Methyl Cytosine
  modified_base (23)..(23): 2'O-Methyl Adenosine
  modified_base (24)..(24): 2' Fluoro Guanosine
  modified_base (25)..(25): um
  modified_base (26)..(26): 2' Fluoro Guanosine
  modified_base (27)..(27): um
  modified_base (28)..(28): 2' Fluoro Guanosine
  modified_base (29)..(29): 2'O-Methyl Adenosine
  modified_base (30)..(31): 2'O-Methyl Cytosine
  modified_base (32)..(32): gm
  modified_base (33)..(33): 2'O-Methyl Cytosine
  modified_base (34)..(34): gm
  modified_base (35)..(36): 2'O-Methyl Cytosine
  modified_base (37)..(37): gm
  modified_base (38)..(38): 2'O-Methyl Cytosine
  modified_base (38)..(38): inverted deoxythymidine incorporated at the 3'  end

SEQ ID NO: 407 - RNA, 33 nt, Artificial Sequence; identical to SEQ ID NO: 1
  Aptamer
  modified_base (1)..(2): 2'O-Methyl Cytosine
  misc_feature (1)..(1): The 2'O-Methyl cytosine is attached through the linker 1,3-propanediolspacer to 2'O-Methyl cytosine of SEQ ID NO: 84
  modified_base (3)..(3): 2' Fluoro Guanosine
  modified_base (4)..(4): 2'O-Methyl Cytosine
  modified_base (5)..(5): 2' Fluoro Guanosine
  modified_base (6)..(6): 2'O-Methyl Cytosine
  modified_base (7)..(8): 2' Fluoro Guanosine
  modified_base (9)..(9): 2'O-Methyl Adenosine
  modified_base (10)..(12): 2' Fluoro Guanosine
  modified_base (13)..(13): gm
  modified_base (14)..(16): um
  modified_base (17)..(17): 2'O-Methyl Cytosine
  modified_base (18)..(18): 2'O-Methyl Adenosine
  modified_base (19)..(19): um
  modified_base (20)..(21): 2'O-Methyl Adenosine
  modified_base (22)..(22): um
  modified_base (23)..(25): 2'O-Methyl Cytosine
  modified_base (26)..(26): 2' Fluoro Guanosine
  modified_base (27)..(29): um
  modified_base (30)..(30): gm
  modified_base (31)..(31): um
  modified_base (32)..(32): 2'O-Methyl Cytosine
  modified_base (33)..(33): gm
  modified_base (33)..(33): inverted deoxythymidine incorporated at the 3'  end

SEQ ID NO: 408 - RNA, 33 nt, Artificial Sequence; identical to SEQ ID NO: 1
  Aptamer
  modified_base (1)..(2): 2'O-Methyl Cytosine
  misc_feature (1)..(1): The 2'O-Methyl cytosine is attached through the linker 1,3-propanediolspacer to 2'O-Methyl cytosine of SEQ ID NO: 85
  modified_base (3)..(3): 2' Fluoro Guanosine
  modified_base (4)..(4): 2'O-Methyl Cytosine
  modified_base (5)..(5): 2' Fluoro Guanosine
  modified_base (6)..(6): 2'O-Methyl Cytosine
  modified_base (7)..(8): 2' Fluoro Guanosine
  modified_base (9)..(9): 2'O-Methyl Adenosine
  modified_base (10)..(12): 2' Fluoro Guanosine
  modified_base (13)..(13): gm
  modified_base (14)..(16): um
  modified_base (17)..(17): 2'O-Methyl Cytosine
  modified_base (18)..(18): 2'O-Methyl Adenosine
  modified_base (19)..(19): um
  modified_base (20)..(21): 2'O-Methyl Adenosine
  modified_base (22)..(22): um
  modified_base (23)..(25): 2'O-Methyl Cytosine
  modified_base (26)..(26): 2' Fluoro Guanosine
  modified_base (27)..(29): um
  modified_base (30)..(30): gm
  modified_base (31)..(31): um
  modified_base (32)..(32): 2'O-Methyl Cytosine
  modified_base (33)..(33): gm
  modified_base (33)..(33): inverted deoxythymidine incorporated at the 3'  end

SEQ ID NO: 409 - RNA, 33 nt, Artificial Sequence; identical to SEQ ID NO: 1
  Aptamer
  modified_base (1)..(2): 2'O-Methyl Cytosine
  misc_feature (1)..(1): The 2'O-Methyl cytosine is attached through the linker 1,3-propanediolspacer to 2'O-Methyl cytosine of SEQ ID NO: 86
  modified_base (3)..(3): 2' Fluoro Guanosine
  modified_base (4)..(4): 2'O-Methyl Cytosine
  modified_base (5)..(5): 2' Fluoro Guanosine
  modified_base (6)..(6): 2'O-Methyl Cytosine
  modified_base (7)..(8): 2' Fluoro Guanosine
  modified_base (9)..(9): 2'O-Methyl Adenosine
  modified_base (10)..(12): 2' Fluoro Guanosine
  modified_base (13)..(13): gm
  modified_base (14)..(16): um
  modified_base (17)..(17): 2'O-Methyl Cytosine
  modified_base (18)..(18): 2'O-Methyl Adenosine
  modified_base (19)..(19): um
  modified_base (20)..(21): 2'O-Methyl Adenosine
  modified_base (22)..(22): um
  modified_base (23)..(25): 2'O-Methyl Cytosine
  modified_base (26)..(26): 2' Fluoro Guanosine
  modified_base (27)..(29): um
  modified_base (30)..(30): gm
  modified_base (31)..(31): um
  modified_base (32)..(32): 2'O-Methyl Cytosine
  modified_base (33)..(33): gm
  modified_base (33)..(33): inverted deoxythymidine incorporated at the 3'  end

SEQ ID NO: 410 - RNA, 33 nt, Artificial Sequence; identical to SEQ ID NO: 1
  Aptamer
  modified_base (1)..(2): 2'O-Methyl Cytosine
  misc_feature (1)..(1): The 2'O-Methyl cytosine is attached through the linker 1,3-propanediolspacer to 2'O-Methyl cytosine of SEQ ID NO: 86
  modified_base (3)..(3): 2' Fluoro Guanosine
  modified_base (4)..(4): 2'O-Methyl Cytosine
  modified_base (5)..(5): 2' Fluoro Guanosine
  modified_base (6)..(6): 2'O-Methyl Cytosine
  modified_base (7)..(8): 2' Fluoro Guanosine
  modified_base (9)..(9): 2'O-Methyl Adenosine
  modified_base (10)..(12): 2' Fluoro Guanosine
  modified_base (13)..(13): gm
  modified_base (14)..(16): um
  modified_base (17)..(17): 2'O-Methyl Cytosine
  modified_base (18)..(18): 2'O-Methyl Adenosine
  modified_base (19)..(19): um
  modified_base (20)..(21): 2'O-Methyl Adenosine
  modified_base (22)..(22): um
  modified_base (23)..(25): 2'O-Methyl Cytosine
  modified_base (26)..(26): 2' Fluoro Guanosine
  modified_base (27)..(29): um
  modified_base (30)..(30): gm
  modified_base (31)..(31): um
  modified_base (32)..(32): 2'O-Methyl Cytosine
  modified_base (33)..(33): gm
  modified_base (33)..(33): inverted deoxythymidine incorporated at the 3'  end

SEQ ID NO: 411 - RNA, 33 nt, Artificial Sequence; identical to SEQ ID NO: 1
  Aptamer
  modified_base (1)..(2): 2'O-Methyl Cytosine
  misc_feature (1)..(1): The 2'O-Methyl cytosine is attached through the linker 1,3-propanediolspacer to 2'O-Methyl cytosine of SEQ ID NO: 88
  modified_base (3)..(3): 2' Fluoro Guanosine
  modified_base (4)..(4): 2'O-Methyl Cytosine
  modified_base (5)..(5): 2' Fluoro Guanosine
  modified_base (6)..(6): 2'O-Methyl Cytosine
  modified_base (7)..(8): 2' Fluoro Guanosine
  modified_base (9)..(9): 2'O-Methyl Adenosine
  modified_base (10)..(12): 2' Fluoro Guanosine
  modified_base (13)..(13): gm
  modified_base (14)..(16): um
  modified_base (17)..(17): 2'O-Methyl Cytosine
  modified_base (18)..(18): 2'O-Methyl Adenosine
  modified_base (19)..(19): um
  modified_base (20)..(21): 2'O-Methyl Adenosine
  modified_base (22)..(22): um
  modified_base (23)..(25): 2'O-Methyl Cytosine
  modified_base (26)..(26): 2' Fluoro Guanosine
  modified_base (27)..(29): um
  modified_base (30)..(30): gm
  modified_base (31)..(31): um
  modified_base (32)..(32): 2'O-Methyl Cytosine
  modified_base (33)..(33): gm
  modified_base (33)..(33): inverted deoxythymidine incorporated at the 3'  end

SEQ ID NO: 412 - RNA, 38 nt, Artificial Sequence; identical to SEQ ID NO: 78
  Aptamer
  modified_base (1)..(1): gm
  misc_feature (1)..(1): The 2'O-Methyl guanosine is attached through the linker 1,3-propanediolspacer to 2'O-Methyl cytosine of SEQ ID NO: 90
  modified_base (2)..(2): 2'O-Methyl Cytosine
  modified_base (3)..(4): gm
  modified_base (5)..(5): 2'O-Methyl Cytosine
  modified_base (6)..(6): gm
  modified_base (7)..(7): 2'O-Methyl Adenosine
  modified_base (8)..(8): 2'O-Methyl Cytosine
  modified_base (9)..(10): gm
  modified_base (11)..(11): um
  modified_base (12)..(12): 2'O-Methyl Adenosine
  modified_base (13)..(13): gm
  modified_base (14)..(14): 2'O-Methyl Adenosine
  modified_base (15)..(16): um
  modified_base (17)..(17): 2'O-Methyl Adenosine
  modified_base (18)..(18): um
  modified_base (19)..(21): 2' Fluoro Guanosine
  modified_base (22)..(22): 2'O-Methyl Cytosine
  modified_base (23)..(23): 2'O-Methyl Adenosine
  modified_base (24)..(24): 2' Fluoro Guanosine
  modified_base (25)..(25): um
  modified_base (26)..(26): 2' Fluoro Guanosine
  modified_base (27)..(27): um
  modified_base (28)..(28): 2' Fluoro Guanosine
  modified_base (29)..(29): 2'O-Methyl Adenosine
  modified_base (30)..(31): 2'O-Methyl Cytosine
  modified_base (32)..(32): gm
  modified_base (33)..(33): 2'O-Methyl Cytosine
  modified_base (34)..(34): gm
  modified_base (35)..(36): 2'O-Methyl Cytosine
  modified_base (37)..(37): gm
  modified_base (38)..(38): 2'O-Methyl Cytosine
  modified_base (38)..(38): inverted deoxythymidine incorporated at the 3'  end

SEQ ID NO: 413 - RNA, 38 nt, Artificial Sequence; identical to SEQ ID NO: 78
  Aptamer
  modified_base (1)..(1): gm
  misc_feature (1)..(1): The 2'O-Methyl guanosine is attached through the linker hexaethylene glycol spacer to 2'O-Methyl cytosine of SEQ ID NO: 91
  modified_base (2)..(2): 2'O-Methyl Cytosine
  modified_base (3)..(4): gm
  modified_base (5)..(5): 2'O-Methyl Cytosine
  modified_base (6)..(6): gm
  modified_base (7)..(7): 2'O-Methyl Adenosine
  modified_base (8)..(8): 2'O-Methyl Cytosine
  modified_base (9)..(10): gm
  modified_base (11)..(11): um
  modified_base (12)..(12): 2'O-Methyl Adenosine
  modified_base (13)..(13): gm
  modified_base (14)..(14): 2'O-Methyl Adenosine
  modified_base (15)..(16): um
  modified_base (17)..(17): 2'O-Methyl Adenosine
  modified_base (18)..(18): um
  modified_base (19)..(21): 2' Fluoro Guanosine
  modified_base (22)..(22): 2'O-Methyl Cytosine
  modified_base (23)..(23): 2'O-Methyl Adenosine
  modified_base (24)..(24): 2' Fluoro Guanosine
  modified_base (25)..(25): um
  modified_base (26)..(26): 2' Fluoro Guanosine
  modified_base (27)..(27): um
  modified_base (28)..(28): 2' Fluoro Guanosine
  modified_base (29)..(29): 2'O-Methyl Adenosine
  modified_base (30)..(31): 2'O-Methyl Cytosine
  modified_base (32)..(32): gm
  modified_base (33)..(33): 2'O-Methyl Cytosine
  modified_base (34)..(34): gm
  modified_base (35)..(36): 2'O-Methyl Cytosine
  modified_base (37)..(37): gm
  modified_base (38)..(38): 2'O-Methyl Cytosine
  modified_base (38)..(38): ininverted deoxythymidine incorporated at the 3'  end

SEQ ID NO: 414 - RNA, 35 nt, Artificial Sequence; identical to SEQ ID NO: 67
  Aptamer
  modified_base (1)..(2): 2'O-Methyl Cytosine
  misc_feature (1)..(1): The 2'O-Methyl cytosine is attached through the linker 1,3-propanediolspacer to 2'O-Methyl cytosine of SEQ ID NO: 94
  modified_base (3)..(3): 2' Fluoro Guanosine
  modified_base (4)..(4): 2'O-Methyl Cytosine
  modified_base (5)..(5): 2' Fluoro Guanosine
  modified_base (6)..(6): 2'O-Methyl Cytosine
  modified_base (7)..(8): 2' Fluoro Guanosine
  modified_base (9)..(9): 2'O-Methyl Adenosine
  modified_base (10)..(12): 2' Fluoro Guanosine
  modified_base (13)..(13): gm
  modified_base (14)..(16): um
  modified_base (17)..(17): 2'O-Methyl Cytosine
  modified_base (18)..(18): 2'O-Methyl Adenosine
  modified_base (19)..(19): um
  modified_base (20)..(21): 2'O-Methyl Adenosine
  modified_base (22)..(22): um
  modified_base (23)..(25): 2'O-Methyl Cytosine
  modified_base (26)..(26): 2' Fluoro Guanosine
  modified_base (27)..(29): um
  modified_base (30)..(30): gm
  modified_base (31)..(31): um
  modified_base (32)..(32): 2'O-Methyl Cytosine
  modified_base (33)..(34): gm
  modified_base (35)..(35): 2'O-Methyl Cytosine
  modified_base (35)..(35): inverted deoxythymidine incorporated at the 3'  end

SEQ ID NO: 415 - RNA, 35 nt, Artificial Sequence; identical to SEQ ID NO: 67
  Aptamer
  modified_base (1)..(2): 2'O-Methyl Cytosine
  misc_feature (1)..(1): The 2'O-Methyl cytosine is attached through the linker 1,3-propanediolspacer to 2'O-Methyl cytosine of SEQ ID NO: 95
  modified_base (3)..(3): 2' Fluoro Guanosine
  modified_base (4)..(4): 2'O-Methyl Cytosine
  modified_base (5)..(5): 2' Fluoro Guanosine
  modified_base (6)..(6): 2'O-Methyl Cytosine
  modified_base (7)..(8): 2' Fluoro Guanosine
  modified_base (9)..(9): 2'O-Methyl Adenosine
  modified_base (10)..(12): 2' Fluoro Guanosine
  modified_base (13)..(13): gm
  modified_base (14)..(16): um
  modified_base (17)..(17): 2'O-Methyl Cytosine
  modified_base (18)..(18): 2'O-Methyl Adenosine
  modified_base (19)..(19): um
  modified_base (20)..(21): 2'O-Methyl Adenosine
  modified_base (22)..(22): um
  modified_base (23)..(25): 2'O-Methyl Cytosine
  modified_base (26)..(26): 2' Fluoro Guanosine
  modified_base (27)..(29): um
  modified_base (30)..(30): gm
  modified_base (31)..(31): um
  modified_base (32)..(32): 2'O-Methyl Cytosine
  modified_base (33)..(34): gm
  modified_base (35)..(35): 2'O-Methyl Cytosine
  modified_base (35)..(35): inverted deoxythymidine incorporated at the 3'  end

SEQ ID NO: 416 - RNA, 35 nt, Artificial Sequence; identical to SEQ ID NO: 67
  Aptamer
  modified_base (1)..(2): 2'O-Methyl Cytosine
  misc_feature (1)..(1): The 2'O-Methyl cytosine is attached through the linker 1,3-propanediolspacer to 2'O-Methyl cytosine of SEQ ID NO: 96
  modified_base (3)..(3): 2' Fluoro Guanosine
  modified_base (4)..(4): 2'O-Methyl Cytosine
  modified_base (5)..(5): 2' Fluoro Guanosine
  modified_base (6)..(6): 2'O-Methyl Cytosine
  modified_base (7)..(8): 2' Fluoro Guanosine
  modified_base (9)..(9): 2'O-Methyl Adenosine
  modified_base (10)..(12): 2' Fluoro Guanosine
  modified_base (13)..(13): gm
  modified_base (14)..(16): um
  modified_base (17)..(17): 2'O-Methyl Cytosine
  modified_base (18)..(18): 2'O-Methyl Adenosine
  modified_base (19)..(19): um
  modified_base (20)..(21): 2'O-Methyl Adenosine
  modified_base (22)..(22): um
  modified_base (23)..(25): 2'O-Methyl Cytosine
  modified_base (26)..(26): 2' Fluoro Guanosine
  modified_base (27)..(29): um
  modified_base (30)..(30): gm
  modified_base (31)..(31): um
  modified_base (32)..(32): 2'O-Methyl Cytosine
  modified_base (33)..(34): gm
  modified_base (35)..(35): 2'O-Methyl Cytosine
  modified_base (35)..(35): inverted deoxythymidine incorporated at the 3'  end

SEQ ID NO: 417 - RNA, 35 nt, Artificial Sequence; identical to SEQ ID NO: 67
  Aptamer
  modified_base (1)..(2): 2'O-Methyl Cytosine
  misc_feature (1)..(1): The 2'O-Methyl cytosine is attached through the linker 1,3-propanediolspacer to 2'O-Methyl cytosine of SEQ ID NO: 97
  misc_feature (1)..(1): The 2'O-Methyl cytosine is attached through the linker 1,3-propanediolspacer to 2'O-Methyl cytosine of SEQ ID NO: 97
  modified_base (3)..(3): 2' Fluoro Guanosine
  modified_base (4)..(4): 2'O-Methyl Cytosine
  modified_base (5)..(5): 2' Fluoro Guanosine
  modified_base (6)..(6): 2'O-Methyl Cytosine
  modified_base (7)..(8): 2' Fluoro Guanosine
  modified_base (9)..(9): 2'O-Methyl Adenosine
  modified_base (10)..(12): 2' Fluoro Guanosine
  modified_base (13)..(13): gm
  modified_base (14)..(16): um
  modified_base (17)..(17): 2'O-Methyl Cytosine
  modified_base (18)..(18): 2'O-Methyl Adenosine
  modified_base (19)..(19): um
  modified_base (20)..(21): 2'O-Methyl Adenosine
  modified_base (22)..(22): um
  modified_base (23)..(25): 2'O-Methyl Cytosine
  modified_base (26)..(26): 2' Fluoro Guanosine
  modified_base (27)..(29): um
  modified_base (30)..(30): gm
  modified_base (31)..(31): um
  modified_base (32)..(32): 2'O-Methyl Cytosine
  modified_base (33)..(34): gm
  modified_base (35)..(35): 2'O-Methyl Cytosine
  modified_base (35)..(35): inverted deoxythymidine incorporated at the 3'  end

SEQ ID NO: 418 - RNA, 35 nt, Artificial Sequence; identical to SEQ ID NO: 67
  Aptamer
  modified_base (1)..(2): 2'O-Methyl Cytosine
  misc_feature (1)..(1): The 2'O-Methyl cytosine is attached through the linker 1,3-propanediolspacer to 2'O-Methyl cytosine of SEQ ID NO: 98
  modified_base (3)..(3): 2' Fluoro Guanosine
  modified_base (4)..(4): 2'O-Methyl Cytosine
  modified_base (5)..(5): 2' Fluoro Guanosine
  modified_base (6)..(6): 2'O-Methyl Cytosine
  modified_base (7)..(8): 2' Fluoro Guanosine
  modified_base (9)..(9): 2'O-Methyl Adenosine
  modified_base (10)..(12): 2' Fluoro Guanosine
  modified_base (13)..(13): gm
  modified_base (14)..(16): um
  modified_base (17)..(17): 2'O-Methyl Cytosine
  modified_base (18)..(18): 2'O-Methyl Adenosine
  modified_base (19)..(19): um
  modified_base (20)..(21): 2'O-Methyl Adenosine
  modified_base (22)..(22): um
  modified_base (23)..(25): 2'O-Methyl Cytosine
  modified_base (26)..(26): 2' Fluoro Guanosine
  modified_base (27)..(29): um
  modified_base (30)..(30): gm
  modified_base (31)..(31): um
  modified_base (32)..(32): 2'O-Methyl Cytosine
  modified_base (33)..(34): gm
  modified_base (35)..(35): 2'O-Methyl Cytosine
  modified_base (35)..(35): inverted deoxythymidine incorporated at the 3'  end

SEQ ID NO: 419 - RNA, 34 nt, Artificial Sequence; identical to SEQ ID NO: 48
  Aptamer
  modified_base (1)..(2): gm
  misc_feature (1)..(1): The 2'O-Methyl guanosine is attached through the linker 1,3-propanediolspacer to 2'O-Methyl guanosine of SEQ ID NO: 101
  modified_base (3)..(3): 2'O-Methyl Cytosine
  modified_base (4)..(4): gm
  modified_base (5)..(5): 2'O-Methyl Adenosine
  modified_base (6)..(6): 2'O-Methyl Cytosine
  modified_base (7)..(8): gm
  modified_base (9)..(9): um
  modified_base (10)..(10): 2'O-Methyl Adenosine
  modified_base (11)..(11): gm
  modified_base (12)..(12): 2'O-Methyl Adenosine
  modified_base (13)..(14): um
  modified_base (15)..(15): 2'O-Methyl Adenosine
  modified_base (16)..(16): um
  modified_base (17)..(19): 2' Fluoro Guanosine
  modified_base (20)..(20): 2'O-Methyl Cytosine
  modified_base (21)..(21): 2'O-Methyl Adenosine
  modified_base (22)..(22): 2' Fluoro Guanosine
  modified_base (23)..(23): um
  modified_base (24)..(24): 2' Fluoro Guanosine
  modified_base (25)..(25): um
  modified_base (26)..(26): 2' Fluoro Guanosine
  modified_base (27)..(27): 2'O-Methyl Adenosine
  modified_base (28)..(29): 2'O-Methyl Cytosine
  modified_base (30)..(30): gm
  modified_base (31)..(31): 2'O-Methyl Cytosine
  modified_base (32)..(32): gm
  modified_base (33)..(34): 2'O-Methyl Cytosine
  modified_base (34)..(34): inverted deoxythymidine incorporated at the 3'  end

SEQ ID NO: 420 - RNA, 34 nt, Artificial Sequence; identical to SEQ ID NO: 48
  Aptamer
  modified_base (1)..(2): gm
  misc_feature (1)..(1): The 2'O-Methyl guanosine is attached through the linker hexaethylene glycol spacer to 2'O-Methyl guanosine of SEQ ID NO: 102
  misc_feature (1)..(1): The 2'O-Methyl guanosine is attached through the linker hexaethylene glycol spacer to 2'O-Methyl guanosine of SEQ ID NO: 102
  modified_base (3)..(3): 2'O-Methyl Cytosine
  modified_base (4)..(4): gm
  modified_base (5)..(5): 2'O-Methyl Adenosine
  modified_base (6)..(6): 2'O-Methyl Cytosine
  modified_base (7)..(8): gm
  modified_base (9)..(9): um
  modified_base (10)..(10): 2'O-Methyl Adenosine
  modified_base (11)..(11): gm
  modified_base (12)..(12): 2'O-Methyl Adenosine
  modified_base (13)..(14): um
  modified_base (15)..(15): 2'O-Methyl Adenosine
  modified_base (16)..(16): um
  modified_base (17)..(19): 2' Fluoro Guanosine
  modified_base (20)..(20): 2'O-Methyl Cytosine
  modified_base (21)..(21): 2'O-Methyl Adenosine
  modified_base (22)..(22): 2' Fluoro Guanosine
  modified_base (23)..(23): um
  modified_base (24)..(24): 2' Fluoro Guanosine
  modified_base (25)..(25): um
  modified_base (26)..(26): 2' Fluoro Guanosine
  modified_base (27)..(27): 2'O-Methyl Adenosine
  modified_base (28)..(29): 2'O-Methyl Cytosine
  modified_base (30)..(30): gm
  modified_base (31)..(31): 2'O-Methyl Cytosine
  modified_base (32)..(32): gm
  modified_base (33)..(34): 2'O-Methyl Cytosine
  modified_base (34)..(34): inverted deoxythymidine incorporated at the 3'  end

SEQ ID NO: 421 - RNA, 36 nt, Artificial Sequence; identical to SEQ ID NO: 9
  Aptamer
  modified_base (1)..(1): 2'O-Methyl Cytosine
  misc_feature (1)..(1): The 2'O-Methyl cytosine is attached through the linker 1,3-propanediolspacer to 2'O-Methyl cytosine of SEQ ID NO: 106
  modified_base (2)..(2): gm
  modified_base (3)..(3): 2'O-Methyl Adenosine
  modified_base (4)..(4): 2'O-Methyl Cytosine
  modified_base (5)..(5): um
  modified_base (6)..(7): 2'O-Methyl Cytosine
  modified_base (8)..(8): 2' Fluoro Guanosine
  modified_base (9)..(9): 2'O-Methyl Cytosine
  modified_base (10)..(10): 2' Fluoro Guanosine
  modified_base (11)..(11): 2'O-Methyl Cytosine
  modified_base (12)..(13): 2' Fluoro Guanosine
  modified_base (14)..(14): 2'O-Methyl Adenosine
  modified_base (15)..(16): 2' Fluoro Guanosine
  modified_base (17)..(17): 2'O-Methyl Cytosine
  modified_base (18)..(19): um
  modified_base (20)..(20): 2' Fluoro Guanosine
  modified_base (21)..(21): 2'O-Methyl Adenosine
  modified_base (22)..(23): 2' Fluoro Guanosine
  modified_base (24)..(24): um
  modified_base (25)..(25): 2'O-Methyl Adenosine
  modified_base (26)..(26): 2' Fluoro Guanosine
  modified_base (27)..(28): 2'O-Methyl Cytosine
  modified_base (29)..(29): 2' Fluoro Guanosine
  modified_base (30)..(32): um
  modified_base (33)..(33): gm
  modified_base (34)..(34): um
  modified_base (35)..(35): 2'O-Methyl Cytosine
  modified_base (36)..(36): gm

SEQ ID NO: 422 - RNA, 36 nt, Artificial Sequence; identical to SEQ ID NO: 9
  Aptamer
  modified_base (1)..(1): 2'O-Methyl Cytosine
  misc_feature (1)..(1): The 2'O-Methyl cytosine is attached through the linker hexaethylene glycol spacer to 2'O-Methyl cytosine of SEQ ID NO: 106
  modified_base (3)..(3): 2'O-Methyl Adenosine
  modified_base (4)..(4): 2'O-Methyl Cytosine
  modified_base (5)..(5): um
  modified_base (6)..(7): 2'O-Methyl Cytosine
  modified_base (8)..(8): 2' Fluoro Guanosine
  modified_base (9)..(9): 2'O-Methyl Cytosine
  modified_base (10)..(10): 2' Fluoro Guanosine
  modified_base (11)..(11): 2'O-Methyl Cytosine
  modified_base (12)..(13): 2' Fluoro Guanosine
  modified_base (13)..(13): gm
  modified_base (14)..(14): 2'O-Methyl Adenosine
  modified_base (15)..(16): 2' Fluoro Guanosine
  modified_base (17)..(17): 2'O-Methyl Cytosine
  modified_base (18)..(19): um
  modified_base (20)..(20): 2' Fluoro Guanosine
  modified_base (21)..(21): 2'O-Methyl Adenosine
  modified_base (22)..(23): 2' Fluoro Guanosine
  modified_base (24)..(24): um
  modified_base (25)..(25): 2'O-Methyl Adenosine
  modified_base (26)..(26): 2' Fluoro Guanosine
  modified_base (27)..(28): 2'O-Methyl Cytosine
  modified_base (29)..(29): 2' Fluoro Guanosine
  modified_base (30)..(32): um
  modified_base (33)..(33): gm
  modified_base (34)..(34): um
  modified_base (35)..(35): 2'O-Methyl Cytosine
  modified_base (36)..(36): gm
  modified_base (36)..(36): inverted deoxythymidine incorporated at the 3'  end

SEQ ID NO: 423 - RNA, 34 nt, Artificial Sequence; identical to SEQ ID NO: 48
  Aptamer
  modified_base (1)..(2): gm
  misc_feature (1)..(1): The 2'O-Methyl guanosine is attached through the linker 1,3-propanediolspacer to 2'O-Methyl cytosine of SEQ ID NO: 112
  modified_base (3)..(3): 2'O-Methyl Cytosine
  modified_base (4)..(4): gm
  modified_base (5)..(5): 2'O-Methyl Adenosine
  modified_base (6)..(6): 2'O-Methyl Cytosine
  modified_base (7)..(8): gm
  modified_base (9)..(9): um
  modified_base (10)..(10): 2'O-Methyl Adenosine
  modified_base (11)..(11): gm
  modified_base (12)..(12): 2'O-Methyl Adenosine
  modified_base (13)..(14): um
  modified_base (15)..(15): 2'O-Methyl Adenosine
  modified_base (16)..(16): um
  modified_base (17)..(19): 2' Fluoro Guanosine
  modified_base (20)..(20): 2'O-Methyl Cytosine
  modified_base (21)..(21): 2'O-Methyl Adenosine
  modified_base (22)..(22): 2' Fluoro Guanosine
  modified_base (23)..(23): um
  modified_base (24)..(24): 2' Fluoro Guanosine
  modified_base (25)..(25): um
  modified_base (26)..(26): 2' Fluoro Guanosine
  modified_base (27)..(27): 2'O-Methyl Adenosine
  modified_base (28)..(29): 2'O-Methyl Cytosine
  modified_base (30)..(30): gm
  modified_base (31)..(31): 2'O-Methyl Cytosine
  modified_base (32)..(32): gm
  modified_base (33)..(34): 2'O-Methyl Cytosine
  modified_base (34)..(34): inverted deoxythymidine incorporated at the 3'  end

SEQ ID NO: 424 - RNA, 34 nt, Artificial Sequence; identical to SEQ ID NO: 48
  Aptamer
  modified_base (1)..(2): gm
  misc_feature (1)..(1): The 2'O-Methyl guanosine is attached through the linker hexaethylene glycol spacer to 2'O-Methyl cytosine of SEQ ID NO: 113
  modified_base (3)..(3): 2'O-Methyl Cytosine
  modified_base (4)..(4): gm
  modified_base (5)..(5): 2'O-Methyl Adenosine
  modified_base (6)..(6): 2'O-Methyl Cytosine
  modified_base (7)..(8): gm
  modified_base (9)..(9): um
  modified_base (10)..(10): 2'O-Methyl Adenosine
  modified_base (11)..(11): gm
  modified_base (12)..(12): 2'O-Methyl Adenosine
  modified_base (13)..(14): um
  modified_base (15)..(15): 2'O-Methyl Adenosine
  modified_base (16)..(16): um
  modified_base (17)..(19): 2' Fluoro Guanosine
  modified_base (20)..(20): 2'O-Methyl Cytosine
  modified_base (21)..(21): 2'O-Methyl Adenosine
  modified_base (22)..(22): 2' Fluoro Guanosine
  modified_base (23)..(23): um
  modified_base (24)..(24): 2' Fluoro Guanosine
  modified_base (25)..(25): um
  modified_base (26)..(26): 2' Fluoro Guanosine
  modified_base (27)..(27): 2'O-Methyl Adenosine
  modified_base (28)..(29): 2'O-Methyl Cytosine
  modified_base (30)..(30): gm
  modified_base (31)..(31): 2'O-Methyl Cytosine
  modified_base (32)..(32): gm
  modified_base (33)..(34): 2'O-Methyl Cytosine
  modified_base (34)..(34): inverted deoxythymidine incorporated at the 3'  end

SEQ ID NO: 425 - RNA, 40 nt, Artificial Sequence; identical to SEQ ID NO: 110
  Aptamer
  modified_base (1)..(1): gm
  misc_feature (1)..(1): The 2'O-Methyl guanosine is attached through the linker 1,3-propanediolspacer to 2'O-Methyl cytosine of SEQ ID NO: 117
  modified_base (3)..(3): 2'O-Methyl Cytosine
  modified_base (4)..(4): gm
  modified_base (5)..(5): 2'O-Methyl Adenosine
  modified_base (6)..(6): 2'O-Methyl Cytosine
  modified_base (7)..(7): um
  modified_base (8)..(9): 2'O-Methyl Cytosine
  modified_base (10)..(10): 2' Fluoro Guanosine
  modified_base (11)..(11): 2'O-Methyl Cytosine
  modified_base (12)..(12): 2' Fluoro Guanosine
  modified_base (13)..(13): 2'O-Methyl Cytosine
  modified_base (14)..(15): 2' Fluoro Guanosine
  modified_base (16)..(16): 2'O-Methyl Adenosine
  modified_base (17)..(18): 2' Fluoro Guanosine
  modified_base (19)..(19): 2'O-Methyl Cytosine
  modified_base (20)..(21): um
  modified_base (22)..(22): 2' Fluoro Guanosine
  modified_base (23)..(23): 2'O-Methyl Adenosine
  modified_base (24)..(25): 2' Fluoro Guanosine
  modified_base (26)..(26): um
  modified_base (27)..(27): 2'O-Methyl Adenosine
  modified_base (28)..(28): 2' Fluoro Guanosine
  modified_base (29)..(30): 2'O-Methyl Cytosine
  modified_base (31)..(31): 2' Fluoro Guanosine
  modified_base (32)..(34): um
  modified_base (35)..(35): gm
  modified_base (36)..(36): um
  modified_base (37)..(37): 2'O-Methyl Cytosine
  modified_base (38)..(39): gm
  modified_base (40)..(40): inverted deoxythymidine incorporated at the 3'  end
  modified_base (40)..(40): 2'O-Methyl Cytosine

SEQ ID NO: 426 - RNA, 40 nt, Artificial Sequence; identical to SEQ ID NO: 110
  Aptamer
  modified_base (1)..(1): I
  misc_feature (1)..(1): The 2'O-Methyl guanosine is attached through the linker hexaethylene glycol spacer to 2'O-Methyl cytosine of SEQ ID NO: 118
  modified_base (2)..(3): 2'O-Methyl Cytosine
  modified_base (4)..(4): I
  modified_base (5)..(5): 2'O-Methyl Adenosine
  modified_base (6)..(6): 2'O-Methyl Cytosine
  modified_base (7)..(7): um
  modified_base (8)..(9): 2'O-Methyl Cytosine
  modified_base (10)..(10): 2' Fluoro Guanosine
  modified_base (11)..(11): 2'O-Methyl Cytosine
  modified_base (12)..(12): 2' Fluoro Guanosine
  modified_base (13)..(13): 2'O-Methyl Cytosine
  modified_base (14)..(15): 2' Fluoro Guanosine
  modified_base (16)..(16): 2'O-Methyl Adenosine
  modified_base (17)..(18): 2' Fluoro Guanosine
  modified_base (19)..(19): 2'O-Methyl Cytosine
  modified_base (20)..(21): um
  modified_base (22)..(22): 2' Fluoro Guanosine
  modified_base (23)..(23): 2'O-Methyl Adenosine
  modified_base (24)..(25): 2' Fluoro Guanosine
  modified_base (26)..(26): um
  modified_base (27)..(27): 2'O-Methyl Adenosine
  modified_base (28)..(28): 2' Fluoro Guanosine
  modified_base (29)..(30): 2'O-Methyl Cytosine
  modified_base (31)..(31): 2' Fluoro Guanosine
  modified_base (32)..(34): um
  modified_base (35)..(35): I
  modified_base (36)..(36): um
  modified_base (37)..(37): 2'O-Methyl Cytosine
  modified_base (38)..(39): I
  modified_base (40)..(40): inverted deoxythymidine incorporated at the 3'  end
  modified_base (40)..(40): 2'O-Methyl Cytosine

SEQ ID NO: 427 - RNA, 38 nt, Artificial Sequence; identical to SEQ ID NO: 78
  Aptamer
  modified_base (1)..(1): gm
  misc_feature (1)..(1): The 2'O-Methyl guanosine is attached through the linker 1,3-propanediolspacer to 2'O-Methyl guanosine of SEQ ID NO: 122
  modified_base (2)..(2): 2'O-Methyl Cytosine
  modified_base (3)..(4): gm
  modified_base (5)..(5): 2'O-Methyl Cytosine
  modified_base (6)..(6): gm
  modified_base (7)..(7): 2'O-Methyl Adenosine
  modified_base (8)..(8): 2'O-Methyl Cytosine
  modified_base (9)..(10): gm
  modified_base (11)..(11): um
  modified_base (12)..(12): 2'O-Methyl Adenosine
  modified_base (13)..(13): gm
  modified_base (14)..(14): 2'O-Methyl Adenosine
  modified_base (15)..(16): um
  modified_base (17)..(17): 2'O-Methyl Adenosine
  modified_base (18)..(18): um
  modified_base (19)..(21): 2' Fluoro Guanosine
  modified_base (22)..(22): 2'O-Methyl Cytosine
  modified_base (23)..(23): 2'O-Methyl Adenosine
  modified_base (24)..(24): 2' Fluoro Guanosine
  modified_base (25)..(25): um
  modified_base (26)..(26): 2' Fluoro Guanosine
  modified_base (27)..(27): um
  modified_base (28)..(28): 2' Fluoro Guanosine
  modified_base (29)..(29): 2'O-Methyl Adenosine
  modified_base (30)..(31): 2'O-Methyl Cytosine
  modified_base (32)..(32): gm
  modified_base (33)..(33): 2'O-Methyl Cytosine
  modified_base (34)..(34): gm
  modified_base (35)..(36): 2'O-Methyl Cytosine
  modified_base (37)..(37): gm
  modified_base (38)..(38): 2'O-Methyl Cytosine
  modified_base (38)..(38): inverted deoxythymidine incorporated at the 3'  end

SEQ ID NO: 428 - RNA, 38 nt, Artificial Sequence; identical to SEQ ID NO: 78
  Aptamer
  modified_base (1)..(1): gm
  misc_feature (1)..(1): The 2'O-Methyl guanosine is attached through the linker hexaethylene glycol spacer to 2'O-Methyl guanosine of SEQ ID NO: 123
  modified_base (2)..(2): 2'O-Methyl Cytosine
  modified_base (3)..(4): gm
  modified_base (5)..(5): 2'O-Methyl Cytosine
  modified_base (6)..(6): gm
  modified_base (7)..(7): 2'O-Methyl Adenosine
  modified_base (8)..(8): 2'O-Methyl Cytosine
  modified_base (9)..(10): gm
  modified_base (11)..(11): um
  modified_base (12)..(12): 2'O-Methyl Adenosine
  modified_base (13)..(13): gm
  modified_base (14)..(14): 2'O-Methyl Adenosine
  modified_base (15)..(16): um
  modified_base (17)..(17): 2'O-Methyl Adenosine
  modified_base (18)..(18): um
  modified_base (19)..(21): 2' Fluoro Guanosine
  modified_base (22)..(22): 2'O-Methyl Cytosine
  modified_base (23)..(23): 2'O-Methyl Adenosine
  modified_base (24)..(24): 2' Fluoro Guanosine
  modified_base (25)..(25): um
  modified_base (26)..(26): 2' Fluoro Guanosine
  modified_base (27)..(27): um
  modified_base (28)..(28): 2' Fluoro Guanosine
  modified_base (29)..(29): 2'O-Methyl Adenosine
  modified_base (30)..(31): 2'O-Methyl Cytosine
  modified_base (32)..(32): gm
  modified_base (33)..(33): 2'O-Methyl Cytosine
  modified_base (34)..(34): gm
  modified_base (35)..(36): 2'O-Methyl Cytosine
  modified_base (37)..(37): gm
  modified_base (38)..(38): inverted deoxythymidine incorporated at the 3'  end
  modified_base (38)..(38): 2'O-Methyl Cytosine

SEQ ID NO: 429 - RNA, 40 nt, Artificial Sequence; identical to SEQ ID NO: 110
  aptamer
  modified_base (1)..(1): gm
  misc_feature (1)..(1): The 2'O-Methyl guanosine is attached through the linker 1,3-propanediolspacer to 2'O-Methyl cytosine of SEQ ID NO: 127
  modified_base (2)..(3): 2'O-Methyl Cytosine
  modified_base (4)..(4): gm
  modified_base (5)..(5): 2'O-Methyl Adenosine
  modified_base (6)..(6): 2'O-Methyl Cytosine
  modified_base (7)..(7): um
  modified_base (8)..(9): 2'O-Methyl Cytosine
  modified_base (10)..(10): 2' Fluoro Guanosine
  modified_base (11)..(11): 2'O-Methyl Cytosine
  modified_base (12)..(12): 2' Fluoro Guanosine
  modified_base (13)..(13): 2'O-Methyl Cytosine
  modified_base (14)..(15): 2' Fluoro Guanosine
  modified_base (16)..(16): 2'O-Methyl Adenosine
  modified_base (17)..(18): 2' Fluoro Guanosine
  modified_base (19)..(19): 2'O-Methyl Cytosine
  modified_base (20)..(21): um
  modified_base (22)..(22): 2' Fluoro Guanosine
  modified_base (23)..(23): 2'O-Methyl Adenosine
  modified_base (24)..(25): 2' Fluoro Guanosine
  modified_base (26)..(26): um
  modified_base (27)..(27): 2'O-Methyl Adenosine
  modified_base (28)..(28): 2' Fluoro Guanosine
  modified_base (29)..(30): 2'O-Methyl Cytosine
  modified_base (31)..(31): 2' Fluoro Guanosine
  modified_base (32)..(34): um
  modified_base (35)..(35): gm
  modified_base (36)..(36): um
  modified_base (37)..(37): 2'O-Methyl Cytosine
  modified_base (38)..(39): gm
  modified_base (40)..(40): 2'O-Methyl Cytosine
  modified_base (40)..(40): inverted deoxythymidine incorporated at the 3'  end

SEQ ID NO: 430 - RNA, 40 nt, Artificial Sequence; identical to SEQ ID NO: 110
  aptamer
  modified_base (1)..(1): gm
  misc_feature (1)..(1): The 2'O-Methyl guanosine is attached through the linker Hexaethylene glycol spacer to 2'O-Methyl cytosine of SEQ ID NO:128
  modified_base (2)..(3): 2'O-Methyl Cytosine
  modified_base (4)..(4): gm
  modified_base (5)..(5): 2'O-Methyl Adenosine
  modified_base (6)..(6): 2'O-Methyl Cytosine
  modified_base (7)..(7): um
  modified_base (8)..(9): 2'O-Methyl Cytosine
  modified_base (10)..(10): 2' Fluoro Guanosine
  modified_base (11)..(11): 2'O-Methyl Cytosine
  modified_base (12)..(12): 2' Fluoro Guanosine
  modified_base (13)..(13): 2'O-Methyl Cytosine
  modified_base (14)..(15): 2' Fluoro Guanosine
  modified_base (16)..(16): 2'O-Methyl Adenosine
  modified_base (17)..(18): 2' Fluoro Guanosine
  modified_base (19)..(19): 2'O-Methyl Cytosine
  modified_base (20)..(21): um
  modified_base (22)..(22): 2' Fluoro Guanosine
  modified_base (23)..(23): 2'O-Methyl Adenosine
  modified_base (24)..(25): 2' Fluoro Guanosine
  modified_base (26)..(26): um
  modified_base (27)..(27): 2'O-Methyl Adenosine
  modified_base (28)..(28): 2' Fluoro Guanosine
  modified_base (29)..(30): 2'O-Methyl Cytosine
  modified_base (31)..(31): 2' Fluoro Guanosine
  modified_base (32)..(34): um
  modified_base (35)..(35): gm
  modified_base (36)..(36): um
  modified_base (37)..(37): 2'O-Methyl Cytosine
  modified_base (38)..(39): gm
  modified_base (40)..(40): 2'O-Methyl Cytosine
  modified_base (40)..(40): inverted deoxythymidine incorporated at the 3'  end

SEQ ID NO: 431 - RNA, 38 nt, Artificial Sequence; identical to SEQ ID NO: 78
  Aptamer
  modified_base (1)..(1): gm
  misc_feature (1)..(1): The 2'O-Methyl guanosine is attached  through the linker 1,3-propanediolspacer to 2'O-Methyl cytosine of SEQ ID NO: 132
  modified_base (2)..(2): 2'O-Methyl Cytosine
  modified_base (3)..(4): gm
  modified_base (5)..(5): 2'O-Methyl Cytosine
  modified_base (6)..(6): gm
  modified_base (7)..(7): 2'O-Methyl Adenosine
  modified_base (8)..(8): 2'O-Methyl Cytosine
  modified_base (9)..(10): gm
  modified_base (11)..(11): um
  modified_base (12)..(12): 2'O-Methyl Adenosine
  modified_base (13)..(13): gm
  modified_base (14)..(14): 2'O-Methyl Adenosine
  modified_base (15)..(16): um
  modified_base (17)..(17): 2'O-Methyl Adenosine
  modified_base (18)..(18): um
  modified_base (19)..(21): 2' Fluoro Guanosine
  modified_base (22)..(22): 2'O-Methyl Cytosine
  modified_base (23)..(23): 2'O-Methyl Adenosine
  modified_base (24)..(24): 2' Fluoro Guanosine
  modified_base (25)..(25): um
  modified_base (26)..(26): 2' Fluoro Guanosine
  modified_base (27)..(27): um
  modified_base (28)..(28): 2' Fluoro Guanosine
  modified_base (29)..(29): 2'O-Methyl Adenosine
  modified_base (30)..(31): 2'O-Methyl Cytosine
  modified_base (32)..(32): gm
  modified_base (33)..(33): 2'O-Methyl Cytosine
  modified_base (34)..(34): gm
  modified_base (35)..(36): 2'O-Methyl Cytosine
  modified_base (37)..(37): gm
  modified_base (38)..(38): 2'O-Methyl Cytosine
  modified_base (38)..(38): inverted deoxythymidine incorporated at the 3'  end

SEQ ID NO: 432 - RNA, 38 nt, Artificial Sequence; identical to SEQ ID NO: 78
  Aptamer
  modified_base (1)..(1): gm
  misc_feature (1)..(1): The 2'O-Methyl guanosine is attached through the linker Hexaethylene glycol spacer to 2'O-Methyl cytosine of SEQ ID NO:133
  modified_base (2)..(2): 2'O-Methyl Cytosine
  modified_base (3)..(4): gm
  modified_base (5)..(5): 2'O-Methyl Cytosine
  modified_base (6)..(6): gm
  modified_base (7)..(7): 2'O-Methyl Adenosine
  modified_base (8)..(8): 2'O-Methyl Cytosine
  modified_base (9)..(10): gm
  modified_base (11)..(11): um
  modified_base (12)..(12): 2'O-Methyl Adenosine
  modified_base (13)..(13): gm
  modified_base (14)..(14): 2'O-Methyl Adenosine
  modified_base (15)..(16): um
  modified_base (17)..(17): 2'O-Methyl Adenosine
  modified_base (18)..(18): um
  modified_base (19)..(21): 2' Fluoro Guanosine
  modified_base (22)..(22): 2'O-Methyl Cytosine
  modified_base (23)..(23): 2'O-Methyl Adenosine
  modified_base (24)..(24): 2' Fluoro Guanosine
  modified_base (25)..(25): um
  modified_base (26)..(26): 2' Fluoro Guanosine
  modified_base (27)..(27): um
  modified_base (28)..(28): 2' Fluoro Guanosine
  modified_base (29)..(29): 2'O-Methyl Adenosine
  modified_base (30)..(31): 2'O-Methyl Cytosine
  modified_base (32)..(32): gm
  modified_base (33)..(33): 2'O-Methyl Cytosine
  modified_base (34)..(34): gm
  modified_base (35)..(36): 2'O-Methyl Cytosine
  modified_base (37)..(37): gm
  modified_base (38)..(38): 2'O-Methyl Cytosine
  modified_base (38)..(38): inverted deoxythymidine incorporated at the 3'  end

SEQ ID NO: 433 - RNA, 34 nt, Artificial Sequence; identical to SEQ ID NO: 48
  aptamer
  modified_base (1)..(2): gm
  misc_feature (1)..(1): The 2'O-Methyl guanosine is attached  through the linker 1,3-propanediolspacer to 2'O-Methyl guanosine of SEQ ID NO: 143
  modified_base (3)..(3): 2'O-Methyl Cytosine
  modified_base (4)..(4): gm
  modified_base (5)..(5): 2'O-Methyl Adenosine
  modified_base (6)..(6): 2'O-Methyl Cytosine
  modified_base (7)..(8): gm
  modified_base (9)..(9): um
  modified_base (10)..(10): 2'O-Methyl Adenosine
  modified_base (11)..(11): gm
  modified_base (12)..(12): 2'O-Methyl Adenosine
  modified_base (13)..(14): um
  modified_base (15)..(15): 2'O-Methyl Adenosine
  modified_base (16)..(16): um
  modified_base (17)..(19): 2' Fluoro Guanosine
  modified_base (20)..(20): 2'O-Methyl Cytosine
  modified_base (21)..(21): 2'O-Methyl Adenosine
  modified_base (22)..(22): 2' Fluoro Guanosine
  modified_base (23)..(23): um
  modified_base (24)..(24): 2' Fluoro Guanosine
  modified_base (25)..(25): um
  modified_base (26)..(26): 2' Fluoro Guanosine
  modified_base (27)..(27): 2'O-Methyl Adenosine
  modified_base (28)..(29): 2'O-Methyl Cytosine
  modified_base (30)..(30): gm
  modified_base (31)..(31): 2'O-Methyl Cytosine
  modified_base (32)..(32): gm
  modified_base (33)..(34): 2'O-Methyl Cytosine
  modified_base (34)..(34): inverted deoxythymidine incorporated at the 3'  end

SEQ ID NO: 434 - RNA, 34 nt, Artificial Sequence; identical to SEQ ID NO: 48
  aptamer
  modified_base (1)..(2): gm
  misc_feature (1)..(1): The 2'O-Methyl guanosine is attached through the linker Hexaethylene glycol spacer to 2'O-Methyl guanosine of SEQ ID NO:144
  modified_base (3)..(3): 2'O-Methyl Cytosine
  modified_base (4)..(4): gm
  modified_base (5)..(5): 2'O-Methyl Adenosine
  modified_base (6)..(6): 2'O-Methyl Cytosine
  modified_base (7)..(8): gm
  modified_base (9)..(9): um
  modified_base (10)..(10): 2'O-Methyl Adenosine
  modified_base (11)..(11): gm
  modified_base (12)..(12): 2'O-Methyl Adenosine
  modified_base (13)..(14): um
  modified_base (15)..(15): 2'O-Methyl Adenosine
  modified_base (16)..(16): um
  modified_base (17)..(19): 2' Fluoro Guanosine
  modified_base (20)..(20): 2'O-Methyl Cytosine
  modified_base (21)..(21): 2'O-Methyl Adenosine
  modified_base (22)..(22): 2' Fluoro Guanosine
  modified_base (23)..(23): um
  modified_base (24)..(24): 2' Fluoro Guanosine
  modified_base (25)..(25): um
  modified_base (26)..(26): 2' Fluoro Guanosine
  modified_base (27)..(27): 2'O-Methyl Adenosine
  modified_base (28)..(29): 2'O-Methyl Cytosine
  modified_base (30)..(30): gm
  modified_base (31)..(31): 2'O-Methyl Cytosine
  modified_base (32)..(32): gm
  modified_base (33)..(34): 2'O-Methyl Cytosine
  modified_base (34)..(34): inverted deoxythymidine incorporated at the 3'  end

SEQ ID NO: 435 - RNA, 31 nt, Artificial Sequence; identical to SEQ ID NO: 20
  Aptamer
  modified_base (1)..(1): 2'O-Methyl Cytosine
  misc_feature (1)..(1): The 2'O-Methyl cytosine is attached  through the linker 1,3-propanediolspacer to 2'O-Methyl cytosine of SEQ ID NO: 147
  modified_base (3)..(3): 2' Fluoro Guanosine
  modified_base (4)..(4): 2'O-Methyl Cytosine
  modified_base (5)..(5): 2' Fluoro Guanosine
  modified_base (6)..(6): 2'O-Methyl Cytosine
  modified_base (7)..(8): 2' Fluoro Guanosine
  modified_base (9)..(9): 2'O-Methyl Adenosine
  modified_base (10)..(11): 2' Fluoro Guanosine
  modified_base (12)..(12): 2'O-Methyl Cytosine
  modified_base (13)..(14): um
  modified_base (15)..(15): 2' Fluoro Guanosine
  modified_base (16)..(16): 2'O-Methyl Adenosine
  modified_base (17)..(18): 2' Fluoro Guanosine
  modified_base (19)..(19): um
  modified_base (20)..(20): 2'O-Methyl Adenosine
  modified_base (21)..(21): 2' Fluoro Guanosine
  modified_base (22)..(23): 2'O-Methyl Cytosine
  modified_base (24)..(24): 2' Fluoro Guanosine
  modified_base (25)..(27): um
  modified_base (28)..(28): gm
  modified_base (29)..(29): um
  modified_base (30)..(30): 2'O-Methyl Cytosine
  modified_base (31)..(31): gm
  modified_base (31)..(31): inverted deoxythymidine incorporated at the 3'  end

SEQ ID NO: 436 - RNA, 31 nt, Artificial Sequence; identical to SEQ ID NO: 20
  Aptamer
  modified_base (1)..(1): 2'O-Methyl Cytosine
  misc_feature (1)..(1): The 2'O-Methyl cytosine is attached  through the linker 1,3-propanediolspacer to 2'O-Methyl cytosine of another nucleotide sequence CXAC
  modified_base (3)..(3): 2' Fluoro Guanosine
  modified_base (4)..(4): 2'O-Methyl Cytosine
  modified_base (5)..(5): 2' Fluoro Guanosine
  modified_base (6)..(6): 2'O-Methyl Cytosine
  modified_base (7)..(8): 2' Fluoro Guanosine
  modified_base (9)..(9): 2'O-Methyl Adenosine
  modified_base (10)..(11): 2' Fluoro Guanosine
  modified_base (12)..(12): 2'O-Methyl Cytosine
  modified_base (13)..(14): um
  modified_base (15)..(15): 2' Fluoro Guanosine
  modified_base (16)..(16): 2'O-Methyl Adenosine
  modified_base (17)..(18): 2' Fluoro Guanosine
  modified_base (19)..(19): um
  modified_base (20)..(20): 2'O-Methyl Adenosine
  modified_base (21)..(21): 2' Fluoro Guanosine
  modified_base (22)..(23): 2'O-Methyl Cytosine
  modified_base (24)..(24): 2' Fluoro Guanosine
  modified_base (25)..(27): um
  modified_base (28)..(28): gm
  modified_base (29)..(29): um
  modified_base (30)..(30): 2'O-Methyl Cytosine
  modified_base (31)..(31): gm
  modified_base (31)..(31): inverted deoxythymidine incorporated at the 3'  end

SEQ ID NO: 437 - RNA, 31 nt, Artificial Sequence; identical to SEQ ID NO: 20
  Aptamer
  modified_base (1)..(1): 2'O-Methyl Cytosine
  misc_feature (1)..(1): The 2'O-Methyl cytosine is attached  through the linker 1,3-propanediolspacer to 2'O-Methyl cytosine of another nucleotide sequence CXAC
  modified_base (3)..(3): 2' Fluoro Guanosine
  modified_base (4)..(4): 2'O-Methyl Cytosine
  modified_base (5)..(5): 2' Fluoro Guanosine
  modified_base (6)..(6): 2'O-Methyl Cytosine
  modified_base (7)..(8): 2' Fluoro Guanosine
  modified_base (9)..(9): 2'O-Methyl Adenosine
  modified_base (10)..(11): 2' Fluoro Guanosine
  modified_base (12)..(12): 2'O-Methyl Cytosine
  modified_base (13)..(14): um
  modified_base (15)..(15): 2' Fluoro Guanosine
  modified_base (16)..(16): 2'O-Methyl Adenosine
  modified_base (17)..(18): 2' Fluoro Guanosine
  modified_base (19)..(19): um
  modified_base (20)..(20): 2'O-Methyl Adenosine
  modified_base (21)..(21): 2' Fluoro Guanosine
  modified_base (22)..(23): 2'O-Methyl Cytosine
  modified_base (24)..(24): 2' Fluoro Guanosine
  modified_base (25)..(27): um
  modified_base (28)..(28): gm
  modified_base (29)..(29): um
  modified_base (30)..(30): 2'O-Methyl Cytosine
  modified_base (31)..(31): gm
  modified_base (31)..(31): inverted deoxythymidine incorporated at the 3'  end

SEQ ID NO: 438 - RNA, 31 nt, Artificial Sequence; identical to SEQ ID NO: 20
  Aptamer
  modified_base (1)..(1): 2'O-Methyl Cytosine
  misc_feature (1)..(1): The 2'O-Methyl cytosine is attached  through the linker 1,3-propanediolspacer to 2'O-Methyl cytosine of SEQ ID NO: 150
  modified_base (3)..(3): 2' Fluoro Guanosine
  modified_base (4)..(4): 2'O-Methyl Cytosine
  modified_base (5)..(5): 2' Fluoro Guanosine
  modified_base (6)..(6): 2'O-Methyl Cytosine
  modified_base (7)..(8): 2' Fluoro Guanosine
  modified_base (9)..(9): 2'O-Methyl Adenosine
  modified_base (10)..(11): 2' Fluoro Guanosine
  modified_base (12)..(12): 2'O-Methyl Cytosine
  modified_base (13)..(14): um
  modified_base (15)..(15): 2' Fluoro Guanosine
  modified_base (16)..(16): 2'O-Methyl Adenosine
  modified_base (17)..(18): 2' Fluoro Guanosine
  modified_base (19)..(19): um
  modified_base (20)..(20): 2'O-Methyl Adenosine
  modified_base (21)..(21): 2' Fluoro Guanosine
  modified_base (22)..(23): 2'O-Methyl Cytosine
  modified_base (24)..(24): 2' Fluoro Guanosine
  modified_base (25)..(27): um
  modified_base (28)..(28): gm
  modified_base (29)..(29): um
  modified_base (30)..(30): 2'O-Methyl Cytosine
  modified_base (31)..(31): gm
  modified_base (31)..(31): inverted deoxythymidine incorporated at the 3'  end

SEQ ID NO: 439 - RNA, 67 nt, Artificial Sequence
  Aptamer
  modified_base (1)..(2): 2'O-Methyl Cytosine
  misc_feature (1)..(1): The 2'O-Methyl cytosine is attached  through the linker 1,3-propanediolspacer to 2'O-Methyl cytosine of another nucleotide sequence XCCXAC
  modified_base (1)..(2): gm
  modified_base (3)..(3): 2' Fluoro Guanosine
  modified_base (4)..(4): 2'O-Methyl Cytosine
  modified_base (5)..(5): 2' Fluoro Guanosine
  modified_base (6)..(6): 2'O-Methyl Cytosine
  modified_base (6)..(6): 2'O-Methyl Cytosine
  modified_base (9)..(9): 2'O-Methyl Adenosine
  modified_base (12)..(12): 2'O-Methyl Cytosine
  modified_base (16)..(16): 2'O-Methyl Adenosine
  modified_base (20)..(20): 2'O-Methyl Adenosine
  modified_base (22)..(23): 2'O-Methyl Cytosine
  modified_base (27)..(27): um
  modified_base (28)..(28): gm
  modified_base (30)..(30): 2'O-Methyl Cytosine
  modified_base (30)..(30): 2'O-Methyl Cytosine
  modified_base (31)..(32): gm
  modified_base (32)..(32): 2' Fluoro Guanosine
  modified_base (33)..(33): 2'O-Methyl Cytosine
  modified_base (34)..(35): gm
  modified_base (36)..(36): 2'O-Methyl Cytosine
  modified_base (37)..(37): gm
  modified_base (38)..(38): 2'O-Methyl Adenosine
  modified_base (39)..(39): 2'O-Methyl Cytosine
  modified_base (40)..(41): gm
  modified_base (43)..(43): 2'O-Methyl Adenosine
  modified_base (44)..(44): gm
  modified_base (45)..(45): 2'O-Methyl Adenosine
  modified_base (48)..(48): 2'O-Methyl Adenosine
  modified_base (53)..(53): 2'O-Methyl Cytosine
  modified_base (54)..(54): 2'O-Methyl Adenosine
  modified_base (60)..(60): 2'O-Methyl Adenosine
  modified_base (60)..(60): gm
  modified_base (61)..(62): 2'O-Methyl Cytosine
  modified_base (63)..(63): gm
  modified_base (64)..(64): 2'O-Methyl Cytosine
  modified_base (66)..(67): 2'O-Methyl Cytosine
  modified_base (67)..(67): inverted deoxythymidine incorporated at the 3'  end
ccgcgcggaggcuugagguagccguuugucggcggcgacgguagauuaugggcagugugaccgcgcc

SEQ ID NO: 440 - RNA, 72 nt, Artificial Sequence
  Aptamer
  modified_base (1)..(2): 2'O-Methyl Cytosine
  misc_feature (1)..(1): The 2'O-Methyl cytosine is attached  through the linker 1,3-propanediolspacer to 2'O-Methyl cytosine of another nucleotide sequence XCCXAC
  modified_base (3)..(3): 2' Fluoro Guanosine
  modified_base (4)..(4): 2'O-Methyl Cytosine
  modified_base (5)..(5): 2' Fluoro Guanosine
  modified_base (6)..(6): 2'O-Methyl Cytosine
  modified_base (7)..(8): 2' Fluoro Guanosine
  modified_base (9)..(9): 2'O-Methyl Adenosine
  modified_base (10)..(11): 2' Fluoro Guanosine
  modified_base (12)..(12): 2'O-Methyl Cytosine
  modified_base (13)..(14): um
  modified_base (15)..(15): 2' Fluoro Guanosine
  modified_base (16)..(16): 2'O-Methyl Adenosine
  modified_base (17)..(18): 2' Fluoro Guanosine
  modified_base (19)..(19): um
  modified_base (20)..(20): 2'O-Methyl Adenosine
  modified_base (21)..(21): 2' Fluoro Guanosine
  modified_base (22)..(23): 2'O-Methyl Cytosine
  modified_base (24)..(24): 2' Fluoro Guanosine
  modified_base (25)..(27): um
  modified_base (28)..(28): gm
  modified_base (29)..(29): um
  modified_base (30)..(30): 2'O-Methyl Cytosine
  modified_base (31)..(32): gm
  modified_base (33)..(33): 2'O-Methyl Cytosine
  modified_base (34)..(38): 2'O-Methyl deoxyuridine
  misc_feature (34)..(38): 2'O-Methyl deoxyuridine linker
  modified_base (39)..(40): gm
  modified_base (41)..(41): 2'O-Methyl Cytosine
  modified_base (42)..(42): gm
  modified_base (43)..(43): 2'O-Methyl Adenosine
  modified_base (44)..(44): 2'O-Methyl Cytosine
  modified_base (45)..(46): gm
  modified_base (47)..(47): um
  modified_base (48)..(48): 2'O-Methyl Adenosine
  modified_base (49)..(49): gm
  modified_base (50)..(50): 2'O-Methyl Adenosine
  modified_base (51)..(52): um
  modified_base (53)..(53): 2'O-Methyl Adenosine
  modified_base (54)..(54): um
  modified_base (55)..(57): 2' Fluoro Guanosine
  modified_base (58)..(58): 2'O-Methyl Cytosine
  modified_base (59)..(59): 2'O-Methyl Adenosine
  modified_base (60)..(60): 2' Fluoro Guanosine
  modified_base (61)..(61): um
  modified_base (62)..(62): 2' Fluoro Guanosine
  modified_base (63)..(63): um
  modified_base (64)..(64): 2' Fluoro Guanosine
  modified_base (65)..(65): 2'O-Methyl Adenosine
  modified_base (66)..(67): 2'O-Methyl Cytosine
  modified_base (68)..(68): gm
  modified_base (69)..(69): 2'O-Methyl Cytosine
  modified_base (70)..(70): gm
  modified_base (71)..(72): 2'O-Methyl Cytosine
  modified_base (72)..(72): inverted deoxythymidine incorporated at the 3'  end
ccgcgcggaggcuugagguagccguuugucggcuuuuuggcgacgguagauuaugggcagugugaccgcgcc

SEQ ID NO: 441 - RNA, 77 nt, Artificial Sequence
  Aptamer
  modified_base (1)..(2): 2'O-Methyl Cytosine
  misc_feature (1)..(1): The 2'O-Methyl cytosine is attached  through the linker 1,3-propanediolspacer to 2'O-Methyl cytosine of another nucleotide sequence XCCXAC
  modified_base (3)..(3): 2' Fluoro Guanosine
  modified_base (4)..(4): 2'O-Methyl Cytosine
  modified_base (5)..(5): 2'O-Methyl Cytosine
  modified_base (6)..(6): 2'O-Methyl Cytosine
  modified_base (7)..(8): 2' Fluoro Guanosine
  modified_base (9)..(9): 2'O-Methyl Adenosine
  modified_base (10)..(11): 2' Fluoro Guanosine
  modified_base (12)..(12): 2'O-Methyl Cytosine
  modified_base (13)..(14): um
  modified_base (15)..(15): 2' Fluoro Guanosine
  modified_base (16)..(16): 2'O-Methyl Adenosine
  modified_base (17)..(18): 2' Fluoro Guanosine
  modified_base (19)..(19): um
  modified_base (20)..(20): 2'O-Methyl Adenosine
  modified_base (21)..(21): 2' Fluoro Guanosine
  modified_base (22)..(23): 2'O-Methyl Cytosine
  modified_base (24)..(24): 2' Fluoro Guanosine
  modified_base (25)..(27): um
  modified_base (28)..(28): gm
  modified_base (29)..(29): um
  modified_base (30)..(30): 2'O-Methyl Cytosine
  modified_base (31)..(32): gm
  modified_base (33)..(33): 2'O-Methyl Cytosine
  modified_base (34)..(43): 2'O-Methyl deoxyuridine
  misc_feature (34)..(43): 2'O-Methyl deoxyuridine linker
  modified_base (44)..(45): gm
  modified_base (46)..(46): 2'O-Methyl Cytosine
  modified_base (47)..(47): gm
  modified_base (48)..(48): 2'O-Methyl Adenosine
  modified_base (49)..(49): 2'O-Methyl Cytosine
  modified_base (50)..(51): gm
  modified_base (52)..(52): um
  modified_base (53)..(53): 2'O-Methyl Adenosine
  modified_base (54)..(54): gm
  modified_base (55)..(55): 2'O-Methyl Adenosine
  modified_base (56)..(57): um
  modified_base (58)..(58): 2'O-Methyl Adenosine
  modified_base (59)..(59): um
  modified_base (60)..(62): 2' Fluoro Guanosine
  modified_base (63)..(63): 2'O-Methyl Cytosine
  modified_base (64)..(64): 2'O-Methyl Adenosine
  modified_base (65)..(65): 2' Fluoro Guanosine
  modified_base (66)..(66): um
  modified_base (67)..(67): 2' Fluoro Guanosine
  modified_base (68)..(68): um
  modified_base (69)..(69): 2' Fluoro Guanosine
  modified_base (70)..(70): 2'O-Methyl Adenosine
  modified_base (71)..(72): 2'O-Methyl Cytosine
  modified_base (73)..(73): gm
  modified_base (74)..(74): 2'O-Methyl Cytosine
  modified_base (75)..(75): gm
  modified_base (76)..(77): 2'O-Methyl Cytosine
  modified_base (77)..(77): inverted deoxythymidine incorporated at the 3'  end
ccgcgcggaggcuugagguagccguuugucggcuuuuuuuuuuggcgacgguagauuaugggcagugugaccgcgcc

SEQ ID NO: 442 - RNA, 31 nt, Artificial Sequence; identical to SEQ ID NO: 20
  Aptamer
  modified_base (1)..(1): 2'O-Methyl Cytosine
  misc_feature (1)..(1): The 2'O-Methyl cytosine is attached  through the linker 1,3-propanediolspacer to 2'O-Methyl cytosine of SEQ ID NO: 151
  misc_feature (1)..(1): The 2'O-Methyl cytosine is attached  through the linker 1,3-propanediolspacer to 2'O-Methyl cytosine of SEQ ID NO: 151
  modified_base (3)..(3): 2' Fluoro Guanosine
  modified_base (4)..(4): 2'O-Methyl Cytosine
  modified_base (5)..(5): 2' Fluoro Guanosine
  modified_base (6)..(6): 2'O-Methyl Cytosine
  modified_base (7)..(8): 2' Fluoro Guanosine
  modified_base (9)..(9): 2'O-Methyl Adenosine
  modified_base (10)..(11): 2' Fluoro Guanosine
  modified_base (12)..(12): 2'O-Methyl Cytosine
  modified_base (13)..(14): um
  modified_base (15)..(15): 2' Fluoro Guanosine
  modified_base (16)..(16): 2'O-Methyl Adenosine
  modified_base (17)..(18): 2' Fluoro Guanosine
  modified_base (19)..(19): um
  modified_base (20)..(20): 2'O-Methyl Adenosine
  modified_base (21)..(21): 2' Fluoro Guanosine
  modified_base (22)..(23): 2'O-Methyl Cytosine
  modified_base (24)..(24): 2' Fluoro Guanosine
  modified_base (25)..(27): um
  modified_base (28)..(28): gm
  modified_base (29)..(29): um
  modified_base (30)..(30): 2'O-Methyl Cytosine
  modified_base (31)..(31): gm
  modified_base (31)..(31): inverted deoxythymidine incorporated at the 3'  end

SEQ ID NO: 443 - RNA, 16 nt, Artificial Sequence
  Aptamer
  modified_base (1)..(1): 2'O-Methyl Cytosine
  modified_base (2)..(3): 2'O-Methyl Cytosine
  modified_base (4)..(4): 2'O-Methyl Cytosine
  modified_base (5)..(5): 2'O-Methyl Adenosine
  modified_base (6)..(6): 2'O-Methyl Cytosine
  modified_base (7)..(10): 2'O-Methyl Adenosine
  modified_base (11)..(11): 2'O-Methyl Cytosine
  modified_base (12)..(12): 2'O-Methyl Adenosine
  modified_base (13)..(13): 2'O-Methyl Cytosine
  modified_base (14)..(15): 2'O-Methyl Cytosine
  modified_base (16)..(16): 2'O-Methyl Cytosine
gccguguuuucacggc

SEQ ID NO: 444 - RNA, 13 nt, Artificial Sequence
  Aptamer
  modified_base (1)..(6): um
  modified_base (7)..(7): 2'O-Methyl Cytosine
  modified_base (8)..(8): 2'O-Methyl Adenosine
  modified_base (9)..(9): 2' Fluoro Guanosine
  modified_base (10)..(10): 2'O-Methyl Adenosine
  modified_base (11)..(11): 2' Fluoro Guanosine
  modified_base (12)..(12): 2'O-Methyl Adenosine
  modified_base (13)..(13): 2' Fluoro Guanosine
uuuuuucagagag

SEQ ID NO: 445 - RNA, 59 nt, Artificial Sequence
  Aptamer
  modified_base (1)..(1): 2'O-Methyl Adenosine
  modified_base (2)..(3): 2' Fluoro Guanosine
  modified_base (4)..(5): 2'O-Methyl Cytosine
  modified_base (6)..(6): 2' Fluoro Guanosine
  modified_base (7)..(8): 2'O-Methyl Cytosine
  modified_base (9)..(9): um
  modified_base (10)..(11): 2'O-Methyl Cytosine
  modified_base (12)..(12): 2' Fluoro Guanosine
  modified_base (13)..(13): 2'O-Methyl Cytosine
  modified_base (14)..(14): 2' Fluoro Guanosine
  modified_base (15)..(15): 2'O-Methyl Cytosine
  modified_base (16)..(17): 2' Fluoro Guanosine
  modified_base (18)..(18): 2'O-Methyl Adenosine
  modified_base (19)..(22): 2' Fluoro Guanosine
  modified_base (23)..(25): um
  modified_base (26)..(26): 2'O-Methyl Cytosine
  modified_base (27)..(27): 2'O-Methyl Adenosine
  modified_base (28)..(29): um
  modified_base (30)..(30): 2'O-Methyl Adenosine
  modified_base (31)..(31): um
  modified_base (32)..(34): 2'O-Methyl Cytosine
  modified_base (35)..(35): 2' Fluoro Guanosine
  modified_base (36)..(38): um
  modified_base (39)..(40): 2' Fluoro Guanosine
  modified_base (41)..(41): 2'O-Methyl Cytosine
  modified_base (42)..(43): 2' Fluoro Guanosine
  modified_base (44)..(44): 2'O-Methyl Cytosine
  modified_base (45)..(52): um
  misc_feature (45)..(52): 2'O-Methyl deoxyuridine linker
  modified_base (53)..(53): 2'O-Methyl Cytosine
  modified_base (54)..(54): 2'O-Methyl Adenosine
  modified_base (55)..(55): 2' Fluoro Guanosine
  modified_base (56)..(56): 2'O-Methyl Adenosine
  modified_base (57)..(57): 2' Fluoro Guanosine
  modified_base (58)..(58): 2'O-Methyl Adenosine
  modified_base (59)..(59): 2' Fluoro Guanosine
aggccgccuccgcgcggagggguuucauuaucccguuuggcggcuuuuuuuucagagag

SEQ ID NO: 446 - RNA, 85 nt, Artificial Sequence
  Aptamer
  modified_base (1)..(1): 2'O-Methyl Adenosine
  modified_base (2)..(3): 2' Fluoro Guanosine
  modified_base (4)..(5): 2'O-Methyl Cytosine
  modified_base (6)..(6): 2' Fluoro Guanosine
  modified_base (7)..(8): 2'O-Methyl Cytosine
  modified_base (9)..(9): um
  modified_base (10)..(11): 2'O-Methyl Cytosine
  modified_base (12)..(12): 2' Fluoro Guanosine
  modified_base (13)..(13): 2'O-Methyl Cytosine
  modified_base (14)..(14): 2' Fluoro Guanosine
  modified_base (15)..(15): 2'O-Methyl Cytosine
  modified_base (16)..(17): 2' Fluoro Guanosine
  modified_base (18)..(18): 2'O-Methyl Adenosine
  modified_base (19)..(22): 2' Fluoro Guanosine
  modified_base (23)..(25): um
  modified_base (26)..(26): 2'O-Methyl Cytosine
  modified_base (27)..(27): 2'O-Methyl Adenosine
  modified_base (28)..(29): um
  modified_base (30)..(30): 2'O-Methyl Adenosine
  modified_base (31)..(31): um
  modified_base (32)..(34): 2'O-Methyl Cytosine
  modified_base (35)..(35): 2' Fluoro Guanosine
  modified_base (36)..(38): um
  modified_base (39)..(40): 2' Fluoro Guanosine
  modified_base (41)..(41): 2'O-Methyl Cytosine
  modified_base (42)..(43): 2' Fluoro Guanosine
  modified_base (44)..(44): 2'O-Methyl Cytosine
  modified_base (45)..(51): um
  modified_base (52)..(53): 2' Fluoro Guanosine
  modified_base (54)..(54): 2'O-Methyl Cytosine
  modified_base (55)..(55): 2' Fluoro Guanosine
  modified_base (56)..(56): 2'O-Methyl Adenosine
  modified_base (57)..(57): 2'O-Methyl Cytosine
  modified_base (58)..(59): 2' Fluoro Guanosine
  modified_base (60)..(60): um
  modified_base (61)..(61): 2'O-Methyl Adenosine
  modified_base (62)..(62): 2' Fluoro Guanosine
  modified_base (63)..(63): 2'O-Methyl Adenosine
  modified_base (64)..(65): um
  modified_base (66)..(66): 2'O-Methyl Adenosine
  modified_base (67)..(67): um
  modified_base (68)..(70): 2' Fluoro Guanosine
  modified_base (71)..(71): 2'O-Methyl Cytosine
  modified_base (72)..(72): 2'O-Methyl Adenosine
  modified_base (73)..(73): 2' Fluoro Guanosine
  modified_base (74)..(74): um
  modified_base (75)..(75): 2' Fluoro Guanosine
  modified_base (76)..(76): um
  modified_base (77)..(77): 2' Fluoro Guanosine
  modified_base (78)..(78): 2'O-Methyl Adenosine
  modified_base (79)..(82): 2'O-Methyl Cytosine
  modified_base (81)..(81): 2' Fluoro Guanosine
  modified_base (83)..(83): 2' Fluoro Guanosine
  modified_base (84)..(85): 2'O-Methyl Cytosine
aggccgccuccgcgcggagggguuucauuaucccguuuggcggcuuuuuuuggcgacgguagauuaugggcagugugaccgcgcc
